(19) United States
(12) Patent Application Publication
(10) Pub. No.: US 2010/0071091 A1
(43) Pub. Date: Mar. 18, 2010

(54) NUCLEIC ACID SEQUENCES ENCODING PROTEINS ASSOCIATED WITH ABIOTIC STRESS RESPONSE AND PLANT CELLS AND PLANTS WITH INCREASED TOLERANCE TO ENVIRONMENTAL STRESS

(75) Inventors: Agnes Chardonnens, Eukhuizen (NL); Piotr Puzio, Mariakerke (BE); Bryan D. McKersie, Raleigh, NC (US)

Correspondence Address: BASF CORPORATION, CARL-BOSCH-STRASSE 38, LUDWIGSHAFEN, D67056, DE

(73) Assignees: BASF PLANT SCIENCE GMBH, LUDWIGSHAFEN (DE); METANOMICS GMBH, BERLIN (DE)

(21) Appl. No.: 11/990,427

(22) PCT Filed: Aug. 12, 2006
(86) PCT No.: PCT/EP2006/065039

§ 371 Date: Mar. 24, 2009

Related U.S. Application Data
(60) Provisional application No. 60/707,841, filed on Aug. 12, 2005.

(51) Int. Cl. A01H 5/00; C12N 15/82; C12N 5/04; C07H 21/04; C12N 15/63; C07K 14/415; C12Q 1/02

(52) U.S. Cl. 800/281; 800/298; 800/320.1; 800/320.3; 800/320; 800/320.2; 800/312; 800/314; 800/306; 800/317; 800/317.2; 800/317.3; 800/317.4; 800/319; 800/278; 800/284; 435/419; 536/23.6; 435/320.1; 530/350; 435/29

(57) ABSTRACT

This invention relates generally to nucleic acid sequences encoding proteins that are associated with abiotic stress responses and abiotic stress tolerance in plants. This invention further relates to transformed plant cells with altered metabolic activity compared to a corresponding non-transformed, wild-type plant cell, wherein the metabolic activity is altered by transformation with a Stress-Related Protein (SRP) coding nucleic acid and results in increased tolerance and/or resistance to an environmental stress as compared to a corresponding non-transformed, wild-type plant cell.

[0001] The instant application contains a “lengthy” Sequence Listing, which has been submitted via CD-R in lieu of a printed, paper copy, and is hereby incorporated by reference in its entirety. Said CD-Rs, recorded on Jul. 29, 2005, are labeled CRF, “Copy 1,” and “Copy 2,” respectively, and each contains only one identical 664 Kb file (00015127.APP).

[0002] This invention relates generally to nucleic acid sequences encoding proteins that are associated with abiotic stress responses and abiotic stress tolerance in plants.

[0003] This invention further relates to transformed plant cells with altered metabolic activity, compared to a corresponding non-transformed wild-type plant cell, wherein the metabolic activity is altered by transformation with a Stress-Related Protein (SRP) coding nucleic acid and results in increased tolerance and/or resistance to an environmental stress, as compared to a corresponding non-transformed wild-type plant cell.

[0004] In particular, this invention relates to nucleic acid sequences encoding proteins that confer drought, heat, cold, and/or salt tolerance and/or resistance to plants, especially by altering the metabolic activity leading to drought, heat, cold, and/or salt tolerance and/or resistance to plants. The invention also deals with methods of producing, screening for, and breeding such plant cells or plants and method of detecting stress in plants cells or plants.

[0005] Abiotic environmental stresses, such as drought stress, salinity stress, heat stress, and cold stress, are major limiting factors of plant growth and productivity (Boyer. 1982. Science 218, 443-448). Crop losses and crop yield losses of major crops, such as rice, maize (corn), and wheat caused by these stresses represent a significant economic and political factor and contribute to food shortages in many underdeveloped countries.

[0006] Plants are typically exposed, during their life cycle, to conditions of reduced environmental water content. Most plants have evolved strategies to protect themselves against these conditions of low water or desiccation (drought). However, if the severity and duration of the drought conditions are too great, the effects on plant development, growth, and yield of most crop plants are profound. Continuous exposure to drought causes major alterations in the plant metabolism. These great changes in metabolism ultimately lead to cell death and consequently yield losses.

[0007] Developing stress-tolerant plants is a strategy that has the potential to solve or mediate at least some of these problems (McKersie and Leshem, 1994, Stress and Stress Coping in Cultivated Plants, Kluwer Academic Publishers). However, traditional plant breeding strategies to develop new lines of plants that exhibit resistance (tolerance) to these types of stresses are relatively slow and require specific resistant lines for crossing with the desired line. Limited germplasm resources for stress tolerance and incompatibility in crosses between distantly related plant species represent significant problems encountered in conventional breeding. Additionally, the cellular processes leading to drought, cold, and salt tolerance are complex in nature and involve multiple mechanisms of cellular adaptation and numerous metabolic pathways (McKersie and Leshem, 1994, Stress and Stress Coping in Cultivated Plants, Kluwer Academic Publishers). This multicomponent nature of stress tolerance has not only made breeding for tolerance largely unsuccessful, but has also limited the ability to genetically engineer stress-tolerance plants using biotechnological methods.

[0008] Drought, heat, cold, and salt stresses have a common theme important for plant growth and that is water availability. Plants are exposed during their entire life cycle to conditions of reduced environmental water content. Most plants have evolved strategies to protect themselves against these conditions. However, if the severity and duration of the drought conditions are too great, the effects on plant development, growth, and yield of most crop plants are profound. Since high salt content in some soils result in less available water for cell intake, its effect is similar to those observed under drought conditions. Additionally, under freezing temperatures, plant cells lose water as a result of ice formation that starts in the apoplast and withdraws water from the symplast (McKersie and Leshem, 1994, Stress and Stress Coping in Cultivated Plants, Kluwer Academic Publishers). Commonly, a plant's molecular response mechanisms to each of these stress conditions are similar.

[0009] The results of current research indicate that drought tolerance is a complex quantitative trait and that no real diagnostic marker is yet available. High salt concentrations, or dehydration, may cause damage at the cellular level during drought stress, but the precise injury is not entirely clear (Bray, 1997, Trends Plant Sci. 2, 48-54). This lack of a mechanistic understanding makes it difficult to design a transgenic approach to improve drought tolerance. However, an important consequence of damage may be the production of reactive oxygen radicals that cause cellular injury, such as lipid peroxidation or protein and nucleic acid modification. Details of oxygen-free, radical chemistry, and their reaction with cellular components such as cell membranes, have been described (McKersie and Leshem, 1994, Stress and Stress Coping in Cultivated Plants, Kluwer Academic Publishers).

[0010] It is the object of this invention to identify new, unique genes capable of conferring stress tolerance to plants upon expression, under expression, or over expression.

[0011] It is a further object of this invention to identify, produce, and breed new, unique stress tolerant and/or resistant plant cells or plants and methods of inducing and detecting stress tolerance and/or resistance in plants or plant cells.

[0012] It is a further object to identify new methods to detect stress tolerance and/or resistance in plants or plant cells. It is also the object of this invention to identify new, unique genes capable of conferring stress tolerance to plants upon expression or over expression.

[0013] The present invention provides a transformed plant cell with altered metabolic activity, compared to a corresponding non-transformed wild-type plant cell, wherein the metabolic activity is altered by transformation with a Stress-Related Protein (SRP) coding nucleic acid and results in increased tolerance and/or resistance to an environmental stress, as compared to a corresponding non-transformed wild-type plant cell.

[0014] The present invention provides a transgenic plant cell transformed by Stress-Related Protein (SRP) coding nucleic acid selected from the group consisting of: a) a nucleic acid molecule encoding one of the polypeptides disclosed in the Sequence Listing or a fragment thereof, which confers an altered metabolic activity in an organism or a part thereof; b) a nucleic acid molecule comprising one of the nucleic acid molecule disclosed in the Sequence Listing; c) a nucleic acid molecule whose sequence can be deduced from a polypeptide sequence encoded by a nucleic acid molecule of (a) or (b) as a result of the degeneracy of the genetic code and conferring an altered metabolic activity in an organism or a part thereof; d) a nucleic acid molecule which encodes a polypeptide, which has at least 50% identity with the amino acid sequence of the polypeptide encoded by the nucleic acid molecule of (a) to (c) and conferring an altered metabolic activity in an organism or a part thereof; e) a nucleic acid molecule which hybridizes with a nucleic acid molecule of (a) to (c) under stringent hybridization conditions and conferring an altered metabolic activity in an organism or a part thereof; f) a nucleic acid molecule which is obtained by amplifying nucleic acid molecules from a cDNA library or a genomic library using the primers as shown in table 2 and conferring an altered metabolic activity in an organism or a part thereof; g) a nucleic acid molecule encoding a polypeptide which is isolated with the aid of monoclonal antibodies against a polypeptide encoded by one of the nucleic acid molecules of (a) to (f) and conferring an altered metabolic activity in an organism or a part thereof; and h) a nucleic acid molecule which is obtainable by screening a suitable nucleic acid library under stringent hybridization conditions with a probe comprising one of the sequences of the nucleic acid molecule of (a) to (k) or with a fragment thereof having at least 15 nt, preferably 20 nt, 30 nt, 50 nt, 100 nt, 200 nt or 500 nt of the nucleic acid, molecule characterized in (a) to (g) and conferring an altered metabolic activity in an organism or a part thereof.

[0015] As used herein, the term “metabolite” refers to intermediate substances, preferably such of low molecular weight, which occur during anabolism and catabolism in a cell or plant, in other words, a substance produced or consumed by metabolism.

[0016] The term “altered metabolic activity” refers to the change (increase or decrease) of the amount, concentration, or activity (meaning here the effective concentration for the purposes of chemical reactions and/or other mass action) of a metabolite in a specific volume relative to a corresponding volume (e.g. in an organism, a tissue, a cell or a cell compartment) of a control, reference, or wild type, including the de novo creation of the activity or expression, measured, for example, by one of the methods described herein below, which is changed or altered (increased or decreased) as compared to a corresponding non-transformed wild-type plant cell.

[0017] The terms “increased,” “raised,” “extended,” “enhanced,” “improved,” or “amplified” relate to a corresponding change of a property in an organism, a part of an organism such as a tissue, seed, root, leave, flower, etc. or in a cell and are interchangeable. Preferably, the overall activity in the volume is increased or enhanced in cases if the increase or enhancement is related to the increase or enhancement of an activity of a gene product, independent of whether the amount of gene product or the specific activity of the gene product, or both, is increased or enhanced or whether the amount, stability, or translation efficacy of the nucleic acid sequence or gene encoding for the gene product is increased or enhanced. The terms “reduction,” “decrease,” or “deletion” relate to a corresponding change of a property in an organism, a part of an organism such as a tissue, seed, root, leave, flower, etc. or in a cell. Preferably, the overall activity in the volume is reduced, decreased, or deleted in cases if the reduction, decrease, or deletion is related to the reduction, decrease, or deletion of an activity of a gene product, independent whether the amount of gene product or the specific activity of the gene product or both is reduced, decreased, or deleted, or whether the amount, stability, or translation efficacy of the nucleic acid sequence or gene encoding for the gene product is reduced, decreased, or deleted.

[0018] The terms “increase” or “decrease” relate to a corresponding change of a property in an organism or in a part of an organism, such as a tissue, seed, root, leave, flower, etc. or in a cell. Preferably, the overall activity in the volume is increased in cases the increase relates to the increase of an activity of a gene product, independent of whether the amount of gene product or the specific activity of the gene product, or both, is increased or generated, or whether the amount, stability, or translation efficacy of the nucleic acid sequence or gene encoding for the gene product is increased.

[0019] Under “change of a property” it is understood that the activity, expression level, or amount of a gene product or the metabolite content is changed in a specific volume relative to a corresponding volume of a control, reference, or wild type, including the de novo creation of the activity or expression.

[0020] The terms “increase” or “decrease” include the change of said property in only parts of the subject of the present invention, for example, the modification can be found in compartment of a cell, like a organelle, or in a part of a plant, like tissue, seed, root, leave, flower, etc., but is not detectable if the overall subject, i.e. complete cell or plant, is tested. Preferably, the increase or decrease is found cellular, thus the term “increase of an activity” or “increase of a metabolite content” relates to the cellular increase compared to the wild-type cell.

[0021] Accordingly, the term “increase” or “decrease” means that the specific activity of an enzyme, as well as the amount of a compound or metabolite, e.g. of a polypeptide, a nucleic acid molecule, or of the fine chemical of the invention, or an encoding mRNA or DNA, can be increased or decreased in a volume.

[0022] The terms “wild type,” “control,” or “reference” are exchangeable and can be a cell or a part of organisms such as an organelle or a tissue, or an organism, in particular a microorganism or a plant, which was not modified or treated according to the herein described process according to the invention. Accordingly, the cell or a part of organisms, such as an organelle or a tissue, or an organism, in particular a microorganism or a plant used as wild type, control, or reference corresponds to the cell, organism, or part thereof as much as possible and is in any other property but in the result of the process of the invention as identical to the subject matter of the invention as possible. Thus, the wild type, control, or reference is treated identically or as identical as possible, saying that only conditions or properties might be different, which do not influence the quality of the tested property.

[0023] Preferably, any comparison is carried out under analogous conditions. The term “analogous conditions” means that all conditions such as, for example, culture or growing conditions, or assay conditions (such as buffer composition, temperature, substrates, pathogen strain, concentrations and the like) are kept identical between the experiments to be compared.

[0024] The “reference,” “control,” or “wild type” is preferably a subject, e.g., an organelle, a cell, a tissue, an organism, in particular a plant or a microorganism, which was not modified or treated according to the herein-described process of the invention and is in any other property as similar to the subject matter of the invention as possible. The reference, control, or wild type is in its genome, transcriptome, proteome, or metabolome as similar as possible to the subject of the present invention. Preferably, the term “reference-” “control-” or “wild type-” -organelle, -cell, -tissue, or organism, in particular plant or microorganism, relates to an organelle, cell, tissue, or organism, in particular plant or microorganism, which is nearly genetically identical to the organelle, cell, tissue, or organism, in particular microorganism or plant, of the present invention or a part thereof preferably 95%, more preferred are 98%, even more preferred are 99.00%, in particular 99.10%, 99.30%, 99.50%, 99.70%, 99.90%, 99.99%, 99.999%, or more. Most preferable the “reference,”“control,” or “wild type” is a subject, e.g. an organelle, a cell, a tissue, an organism, which is genetically identical to the organism, cell, or organelle used according to the process of the invention except that the responsible or activity conferring nucleic acid molecules or the gene product encoded by them are amended, manipulated, exchanged, or introduced, according to the inventive process.

[0025] Preferably, the reference, control or wild type differs form the subject of the present invention only in the cellular activity of the polypeptide of the invention, e.g. as result of an increase in the level of the nucleic acid molecule of the present invention or an increase of the specific activity of the polypeptide of the invention, e.g. by or in the expression level or activity of an protein having the activity of an Stress-Related Protein (SRP) or its homologs, its biochemical or genetic causes and the altered metabolic activity.

[0026] In case a control, reference, or wild type differing from the subject of the present invention, only by not being subject of the process of the invention, cannot be provided, a control, reference, or wild type can be an organism in which the cause for the modulation of an activity conferring the altered metabolic activity or expression of the nucleic acid molecule of the invention, as described herein, has been switched back or off, e.g. by knocking out the expression of responsible gene product, e.g. by antisense inhibition, by inactivation of an activator or agonist, by activation of an inhibitor or antagonist, by inhibition through adding inhibitory antibodies, by adding active compounds as e.g. hormones, by introducing negative dominant mutants, etc. A gene production can, for example, be knocked out by introducing inactivating point mutations, which lead to an enzymatic activity inhibition or a destabilization or an inhibition of the ability to bind to cofactors etc.

[0027] Accordingly, preferred reference subject is the starting subject of the present process of the invention. Preferably, the reference and the subject matter of the invention are compared after standardization and normalization, e.g. to the amount of total RNA, DNA, or protein or activity, or expression of reference genes, like housekeeping genes, such as ubiquitin, actin, or ribosomal proteins.

[0028] A series of mechanisms exists via which a modification of the a protein, e.g. the polypeptide of the invention, can directly or indirectly affect the yield, production, and/or production efficiency of the amino acid.

[0029] For example, the molecule number or the specific activity of the polypeptide, or the nucleic acid molecule, may be increased. Larger amounts of the fine chemical can be produced if the polypeptide or the nucleic acid of the invention is expressed de novo in an organism lacking the activity of said protein. However, it is also possible to increase the expression of the gene, which is naturally present in the organisms, for example, by modifying the regulation of the gene, or by increasing the stability of the corresponding mRNA, or of the corresponding gene product encoded by the nucleic acid molecule of the invention, or by introducing homologous genes from other organisms, which are differently regulated, e.g. not feedback sensitive.

[0030] This also applies analogously to the combined, increased expression of the nucleic acid molecule of the present invention or its gene product with that of further enzymes of the amino acid biosynthesis pathways, e.g., which are useful for the synthesis of the fine chemicals.

[0031] The increase, decrease, or modulation, according to this invention, can be constitutive, e.g., due to a stable permanent transgenic expression or to a stable mutation in the corresponding-endogenous gene encoding the nucleic acid molecule of the invention, or to a modulation of the expression or of the behavior of a gene conferring the expression of the polypeptide of the invention, or transient, e.g. due to an transient transformation or temporary addition of a modulator such as a agonist or antagonist or inducible, e.g. after transformation with a inducible construct carrying the nucleic acid molecule of the invention under control of a inducible promoter and adding the inducer, e.g. tetracycline or as described herein below.

[0032] The increase in activity of the polypeptide amounts in a cell, a tissue, a organelle, an organ, or an organism or a part thereof, preferably to at least 5%, preferably to at least 20%, or at to least 50%, especially preferably to at least 70%, 80%, 90%, or more, very especially preferably are to at least 200%, most preferably are to at least 500%, or more in comparison to the control, reference, or wild type.

[0033] The specific activity of a polypeptide encoded by a nucleic acid molecule of the present invention, or of the polypeptide of the present invention, can be tested as described in the examples. In particular, the expression of a protein in question in a cell, e.g., a plant cell or a microorganism, and the detection of an increase the fine chemical level in comparison to a control is an easy test and can be performed as described in the state of the art.

[0034] The term “increase” includes that a compound or an activity is introduced into a cell de novo or that the compound or the activity has not been detectable before, in other words, it is “generated”.

[0035] Accordingly, in the following, the term “increasing” also comprises the term “generating” or “stimulating”. The increased activity manifests itself in an increase of the fine chemical.

[0036] The transformed plant cells are compared to the corresponding non-transformed wild type of the same genus and species under otherwise identical conditions (such as, for example, culture conditions, age of the plants, and the like). In this context, a change in metabolic activity of at least 10%, advantageously of at least 20%, preferably at least 30%, especially preferably of at least 40%, 50%, or 60%, very especially preferably of at least 70%, 80%, 90%, 95%, or even 100%, or more, in comparison with the non-transformed organism is advantageous.

[0037] Preferably, the change in metabolite concentration of the transformed plant cells is the changed compared to the corresponding non-transformed wild type. Preferably, the change in metabolite concentration is measured by HPLC and calculated by dividing the peak height or peak area of each analyte (metabolite) through the peak area of the respective internal standards. Data is normalized using the individual sample fresh weight. The resulting values are divided by the mean values found for wild-type plants grown under control conditions and analyzed in the same sequence, resulting in the so-called ratios, which represent values independent of the analytical sequence. These ratios indicate the behavior of the metabolite concentration of the transformed plants in comparison to the concentration in the wild-type control plants.

[0038] According to this method, the change in at least one metabolite concentration of the transformed plant cells, compared to the corresponding non-transformed, wild type, is at least 10%, advantageously of at least 20%, preferably at least 40%, 60%, or 80%, especially preferably of at least 90%, 100%, or 200%, very especially preferably of at least 700%, 800%, 900%, 1000% or more.

[0039] Data significance can be determined by all statistical methods known by a person skilled in the art, preferably by a t-test, more preferably by the student t-test.

[0040] Altered metabolic activity also refers to metabolites that, compared to a corresponding non-transformed, wild-type plant cell, are not produced after transformation or are only produced after transformation.

[0041] Preferred metabolites of the invention are 2,3-dimethyl-5-phytylquinol or 2-hydroxy-palmitic acid or 3,4-dihydroxyphenylalanine (=dopa) or 3-hydroxy-palmitic acid or 5-oxoproline or alanine or alpha linolenic acid (c18:3 (c9, c12, c15)) or alpha-tocopherol or aminoadipic acid or anhydroglucose or arginine or aspartic acid or beta-apo-8′ carotenal or beta-carotene or beta-sitosterol or beta-tocopherol or (delta-7-cis,10-cis)-hexadecadienic acid or hexadecatrienic acid or margaric acid or delta-15-cis-tetracosenic acid or ferulic acid or campesterol or cerotic acid (c26:0) or citrulline or cryptoxanthine or eicosenoic acid (20:1) or fructose or fumarate or galactose or gamma-aminobutyric acid or gamma-tocopherol or gluconic acid or glucose or glutamic acid or glutamine or glycerate or glycerinaldehyde or glycerol or glycerol-3-phosphate or glycine or homoserine or inositol or isoleucine or iso-maltose or isopentenyl pyrophosphate or leucine or lignoceric acid (c24:0) or linoleic acid (c18:2 (c9, c12)) or luteine or lycopene or malate or mannose or methionine or methylgalactofuranoside or methylgalactopyranoside or methylgalactopyranoside or palmitic acid (c16:0) or phenylalanine or phosphate or proline or putrescine or pyruvate or raffinose or ribonic acid or serine or shikimate or sinapine acid or stearic acid (c18:0) or succinate or sucrose or threonine or triacontanoic acid or tryptophane or tyrosine or ubichinone or udp-glucose or valine or zeaxanthine.

[0042] Metabolic activity may also be altered concerning one or more derivates of one or more of the above metabolites.

[0043] Preferably, metabolic activity is altered concerning one or more metabolites selected from the group consisting of all of the above metabolites.

[0044] Alternatively, metabolic activity may be altered concerning one or more metabolites selected from the group consisting of mannose, inositol, phosphate, aspartic acid, isoleucine, leucine, gamma-aminobutyric acid, glycerinaldehyde, sucrose, campesterol, valine, beta-tocopherol, ubichinone, palmitic acid (c16:0), 2-hydroxy-palmitic acid, 2,3-dimethyl-5-phytylquinol, beta-carotene, alpha-linolenic acid (c18:3 (c9, c12, c15)), lycopene.

[0045] Alternatively, metabolic activity may be altered concerning one or more metabolites selected from the group consisting of methylgalactofuranoside, beta-sitosterol, delta-15-cis-tetracosenic acid (c24:1 me), margaric acid (c17:0 me), stearic acid (c18:0), methylgalactopyranoside, gamma-tocopherol, linoleic acid (c18:2 (c9, c12)), hexadecatrienic acid (c16:3 me), shikimate, raffinose, glutamic acid, glutamine, udp-glucose, proline, threonine, isopentenyl pyrophosphate, 5-oxoproline, ferulic acid, sinapine acid.

[0046] Alternatively metabolic activity may be altered concerning one or more metabolites selected from the group consisting of tryptophane, citrulline, serine, alanine, glycerite, arginine, 3-hydroxy-palmitic acid, putrescine, 3,4-dihydroxyphenylalanine (=dopa), alpha-tocopherol, aminoadipic acid, anhydroglucose, beta-apo-8′ carotenal, delta-7-cis,10-cis-hexadecadienic acid (c16:2 me), cerotic acid (c26:0), cryptoxanthine, eicosenoic acid (20:1), fructose, fumarate.

[0047] Alternatively, metabolic activity may be altered concerning one or more metabolites selected from the group consisting of galactose, gluconic acid, glucose, glycerol, glycerol-3-phosphate, glycine, homoserine, iso-maltose, lignoceric acid (c24:0), luteine, malate, triacontanoic acid, methionine, phenylalanine, pyruvate, ribonic acid, succinate, tyrosine, zeaxanthine.

[0048] The present invention provides a transgenic plant cell, wherein expression of said nucleic acid sequence in the plant cell results altered metabolic activity leading to increased tolerance and/or resistance to environmental stress, as compared to a corresponding non-transformed, wild-type plant cell. One preferred wild-type plant cell is a non-transformed Arabidopsis plant cell. An example here is the Arabidopsis wild type C24 (Nottingham Arabidopsis Stock Centre, UK; NASC Stock N906).

[0049] Other preferred, wild-type plant cells are a non-transformed from plants selected from the group consisting of maize, wheat, rye, oat, triticale, rice, barley, soybean, peanut, cotton, rapeseed, canola, manihot, pepper, sunflower, flax, borage, safflower, linseed, primrose, rapeseed, turnip rape, tagetes, solanaceous plants, potato, tobacco, eggplant, tomato, Vicia species, pea, alfalfa, coffee, cacao, tea, Salix species, oil palm, coconut, perennial grass, and forage crops.

[0050] More preferred wild-type plant cells are a non-transformed Linum plant cell, preferably Linum usitatissimum, more preferably the variety Brigitta, Golda, Gold Merchant, Helle, Juliel, Olpina, Livia, Marlin, Maedgold, Sporpion, Serenade, Linus, Taunus, Lifax or Liviola, a non-transformed Heliantus plant cell, preferably Heliantus annuus, more preferably the variety Aurasol, Capella, Flavia, Flores, Jazzy, Palulo, Pegasol, PIR64A54, Rigasol, Sariuca, Sideral, Sunny, Alenka, Candisol or Floyd, or a non-transformed Brassica plant cell, preferably Brassica napus, more preferably the variety Dorothy, Evita, Heros, Hyola, Kimbar, Lambada, Licolly, Liconira, Licosmos, Lisonne, Mistral, Passat, Serator, Siapula, Sponsor, Star, Caviar, Hybridol, Baical, Olga, Lara, Doublol, Karola, Falcon, Spirit, Olymp, Zeus, Libero, Kyola, Licord, Lion, Lirajet, Lisbeth, Magnum, Maja, Mendel, Mica, Mohican, Olpop, Ontarion, Panthar, Prinoe, Pronio, Susanna, Talani, Titan, Transfer, Wiking, Woltan, Zeniah, Artus, Contact or Smart.

[0051] The expression of said nucleic acid sequence in the plant cell may directly or indirectly influence the metabolic activity of the transformed plant cells. Preferably, they influence the activity of the above metabolites.

[0052] Preferably, metabolic activity may be altered by transformation with one or more Stress-Related Protein (SRP) coding nucleic acid selected from the group comprising the nucleic acid of the Sequence Listingb homologs of the afore mentioned sequences.

[0053] It is within the scope of the invention to identify the genes encoded by a nucleic acid sequence selected from the group consisting of the nucleic acid of the Sequence Listing and/or homologs thereof in target plants, especially crop plants, and then express the corresponding gene to achieve the altered metabolic activity resulting in increased tolerance and/or resistance to environmental stress. Consequently, the invention is not limited to a specific plant.

[0054] A protein having an activity conferring an altered metabolic activity preferably has the structure of the polypeptide described herein, in particular of the polypeptides comprising a consensus sequence of the polypeptide disclosed in the Sequence Listing or the functional homologues thereof as described herein, or is encoded by the nucleic acid molecule characterized herein or the nucleic acid molecule according to the invention, for example by the nucleic acid molecule as shown in the Sequence Listing or its herein described functional homologues and has the herein mentioned activity.

[0055] It is further possible to detect environmental stress in plant cells or plants by screening the plant cells for altered metabolic activity as compared to non-stress conditions. This allows for monitoring of stress levels in plants, even when no symptoms are visible. Therefore, counter action can be taken earlier and, e.g., crop losses minimized by timely watering.

[0056] It is also within the scope of the invention to screen plant cells or plants for increased tolerance and/or resistance to environmental stress by screening the plant cells under stress conditions for altered metabolic activity as compared to non-stress conditions. This allows selection of plants with increased tolerance and/or resistance to environmental stress without the identification of genes or visual symptoms.

[0057] With the invention, it is further possible to breed plant cells or plants towards increased tolerance and/or resistance to environmental stress by screening the plant cells under stress conditions for altered metabolic activity as compared to non-stress conditions and selecting those with increased tolerance and/or resistance to environmental stress. The screening for metabolite activity is faster and easier than e.g. screening for genes.

[0058] Screening is well known to those skilled in the art and generally refers to the search for a particular attribute or trait. In the invention this trait in a plant or plant cell is preferably the concentration of a metabolite, especially preferred the concentration of the above metabolites. The methods and devices for screening are familiar to those skilled in the art and include GC (gas chromatography), LC (liquid chromatography), HPLC (high performance (pressure) liquid chromatography), MS (mass spectrometry), NMR (nuclear magnetic resonance) spectroscopy, IR (infra red) spectroscopy, photometric methods, etc., and combinations of these methods.

[0059] Breeding is also customary knowledge for those skilled in the art. It is understood as the directed and stable incorporation of a particular attribute or trait into a plant or plant cell.

[0060] The various breeding steps are characterized by well-defined human intervention, such as selecting the lines to be crossed, directing pollination of the parental lines, or selecting appropriate progeny plants. Different breeding measures can be taken, depending on the desired properties. All the techniques are well known by a person skilled in the art and include, for example, but are not limited to, hybridization, inbreeding, backcross breeding, multiline breeding, variety blend, interspecific hybridization, aneuploid techniques, etc. Hybridization techniques also can include the sterilization of plants to yield male or female sterile plants by mechanical, chemical, or biochemical means. Cross pollination of a male sterile plant with pollen of a different line assures that the genome of the male sterile but female fertile plant will uniformly obtain properties of both of the parental lines. The transgenic seeds and plants according to the invention can therefore be used for the breeding of improved plant lines, which can increase the effectiveness of conventional methods, such as herbicide or pesticide treatment, or which allow one to dispense with said methods due to their modified genetic properties. Alternatively new crops with improved stress tolerance, preferably drought and temperature, can be obtained, which, due to their optimized genetic “equipment,” yield harvested product of better quality than products that were not able to tolerate comparable adverse developmental conditions.

[0061] The invention provides that the environmental stress can be salinity, drought, temperature, metal, chemical, pathogenic, and oxidative stresses, or combinations thereof, preferably drought and/or temperature.

[0062] The object of the invention is a transgenic plant cell, wherein the SRP (=stress related protein) is selected preferably from yeast, preferably Saccharomyces cerevisiae, or E. coli or a plant, preferably Brassica napus, Glycine max, or Oryza sativa.

[0063] Object of the invention is also a transgenic plant cell, wherein the SRP coding nucleic acid is at least about 50% homologous to one of the nucleic acid of the Sequence Listing.

[0064] In the transgenic plant cell of the invention, the expression of said nucleic acid results in increased tolerance to an environmental stress, which is preferably achieved by altering metabolic activity, as compared to a corresponding non-transformed, wild-type plant cell. Herein, the environmental stress is selected from the group consisting of salinity, drought, temperature, metal, chemical, pathogenic, and oxidative stresses, or combinations thereof, preferably drought and/or temperature.

[0065] The term “expression” refers to the transcription and/or translation of a codogenic gene segment or gene. As a rule, the resulting product is an mRNA or a protein. However, expression products can also include functional RNAs such as, for example, antisense, nucleic acids, tRNAs, snRNAs, rRNAs, RNAi, siRNA, ribozymes etc. Expression may be systemic, local or temporal, for example limited to certain cell types, tissue, organs or time periods.

[0066] Unless otherwise specified, the terms “polynucleotides,” “nucleic acid,” and “nucleic acid molecule” are interchangeably in the present context. Unless otherwise specified, the terms “peptide,” “polypeptide,” and “protein” are interchangeably in the present context. The term “sequence” may relate to polynucleotides, nucleic acids, nucleic acid molecules, peptides, polypeptides and proteins, depending on the context in which the term “sequence” is used. The terms “gene(s),” “polynucleotide,” “nucleic acid sequence,” “nucleotide sequence,” or “nucleic acid molecule(s),” as used herein, refer to a polymeric form of nucleotides of any length, either ribonucleotides or deoxyribonucleotides. The terms refer only to the primary structure of the molecule.

[0067] Thus, the terms “gene(s),” “polynucleotide,” “nucleic acid sequence,” “nucleotide sequence”, or “nucleic acid molecule(s)” as used herein, include double- and single-stranded DNA and RNA. They also include known types of modifications, for example, methylation, “caps” substitutions of one or more of the naturally occurring nucleotides with an analog. Preferably, the DNA or RNA sequence of the invention comprises a coding sequence encoding the herein defined polypeptide.

[0068] A “coding sequence” is a nucleotide sequence, which is transcribed into mRNA and/or translated into a polypeptide when placed under the control of appropriate regulatory sequences. The boundaries of the coding sequence are determined by a translation start codon at the 5′-terminus and a translation stop codon at the 3′-terminus. A coding sequence can include, but is not limited to, mRNA, cDNA, recombinant nucleotide sequences, or genomic DNA, while introns may be present as well under certain circumstances.

[0069] For the purposes of the invention, as a rule, the plural is intended to encompass the singular and vice versa.

[0070] Further, the transgenic plant cell is derived from a monocotyledonous plant. Alternative, the transgenic plant cell is derived from a dicotyledonous plant. Preferably, the transgenic plant cell is selected from the group consisting of maize, wheat, rye, oat, triticale, rice, barley, soybean, peanut, cotton, rapeseed, canola, manihot, pepper, sunflower, flax, borage, safflower, linseed, primrose, rapeseed, turnip rape, tagetes, solanaceous plants, potato, tobacco, eggplant, tomato, Vicia species, pea, alfalfa, coffee, cacao, tea, Salix species, oil palm, coconut, perennial grass, forage crops, and Arabidopsis thaliana. Moreover, the transgenic plant cell of the present invention can be derived from a gymnosperm plant. Preferably, the plant is selected from the group of spruce, pine, and fir.

[0071] The invention further provides a seed produced by a transgenic plant transformed by a SRP coding nucleic acid, wherein the plant is true breeding for increased tolerance to environmental stress, which is preferably achieved by altering metabolic activity, as compared to a wild-type plant cell. The transgenic plant might be a monocot, a dicot, or a gymnosperm plant. The invention further provides a seed produced by a transgenic plant expressing an SRP, wherein the plant is true breeding for increased tolerance to environmental stress, which is preferably achieved by altering metabolic activity, as compared to a wild-type plant cell. The invention pertains to a seed produced by a transgenic plant, wherein the seed is genetically homozygous for a transgene conferring an increased tolerance to environmental stress, which is preferably achieved by altering metabolic activity, as compared to a wild-type plant.

[0072] The invention further provides an agricultural product produced by any of the below-described transgenic plants, plant parts such as leafs, petal, anther, roots, tubers, stems, buds, flowers, or seeds. The invention further provides an isolated recombinant expression vector comprising a SRP encoding nucleic acid.

[0073] The invention further provides a method of producing a transgenic plant with a SRP coding nucleic acid, wherein expression of the nucleic acid in the plant results in increased tolerance and/or resistance to an environmental stress, which is preferably achieved by altering metabolic activity, as compared to a corresponding non-transformed, wild-type plant cell, comprising: a) transforming a plant cell with an expression vector including a SRP encoding nucleic acid selected from the group comprising a nucleic acid of the Sequence Listing and/or homologs or parts thereof; and b) generating from the plant cell a transgenic plant with an increased tolerance to environmental stress as compared to a corresponding non-transformed wild-type plant.

[0074] With regard to invention described herein, “transformed or transgene” means all those plants or parts thereof which have been brought about by genetic manipulation methods where: a) one or more genes, preferably encoded by one or more nucleic acid sequences as disclosed in the Sequence Listing and/or a homolog thereof; or b) a genetic regulatory element, for example a promoter, which is functionally linked e.g. to the nucleic acid sequence as disclosed in the Sequence Listing and/or a homolog thereof; or c) “a)” and “b)” is/are not present in its/their natural genetic environment or has/have been modified by means of genetic manipulation methods, it being possible for the modification to be, by way of example, a substitution, addition, deletion, inversion or insertion of one or more nucleotide radicals.

[0075] “Natural genetic environment” means the natural chromosomal locus in the organism of origin or the presence in a genomic library. In the case of a genomic library, the natural, genetic environment of the nucleic acid sequence is preferably at least partially still preserved. The environment flanks the nucleic acid sequence at least on one side and has a sequence length of at least 50 bp, preferably at least 500 bp, particularly preferably at least 1000 bp, very particularly preferably at least 5000 bp.

[0076] In said method for producing a transgenic plant comprising an SRP, the SRP coding nucleic acid is selected from the group comprising a nucleic acid as disclosed in the Sequence Listing and/or homologs of the aforementioned sequences. Further, the SRP coding nucleic acid used in the said method is at least about 50% homologous to one of the nucleic acid sequences as disclosed in the Sequence Listing.

[0077] A plant or plant cell is considered “true breeding” for a particular trait if it is genetically homozygous for that trait to the extent that, when the true-breeding plant is self-pollinated, a significant amount of independent segregation of the trait among the progeny is not observed. In the present invention, the trait arises from the transgenic expression of one or more DNA sequences introduced into a plant cell or plant.

[0078] The present invention also provides methods of modifying stress tolerance of a plant, comprising modifying the level of expression of a SRP nucleic acid in the plant. The invention provides one method of producing a transgenic plant with a synthetic, novel, or modified transcription factor that acts by increasing the transcription of a SRP gene. Theoretically it is also possible to obtain a decrease in expression of the gene.

[0079] A method of detecting environmental stress in plant cells or plants comprising screening the plant cells for altered metabolic activity, as compared to non-stress conditions, is also in the scope of the invention.

[0080] Further, a method of screening plant cells or plants for increased tolerance and/or resistance to environmental stress, comprising screening the plant cells under stress conditions for altered metabolic activity, as compared to non-stress conditions, is encompassed in the invention.

[0081] The present invention also encloses a method of breeding plant cells or plants towards increased tolerance and/or resistance to environmental stress, comprising screening the plant cells under stress conditions for altered metabolic activity, as compared to non-stress conditions, and selecting those with increased tolerance and/or resistance to environmental stress.

[0082] In these methods, metabolite activity is preferably altered concerning the above metabolites and groups of metabolites.

[0083] The present invention also encompasses the use of altered metabolic activity and/or a SRP encoding nucleic acid as disclosed in the Sequence Listing and/or homologs of the aforementioned sequences or parts thereof as markers for selection of plants or plant cells with increased tolerance to environmental stress.

[0084] The present invention further encompasses the use of altered metabolic activity and/or a SRP encoding nucleic acid as disclosed in the Sequence Listing and/or homologs of the aforementioned sequences or parts thereof as markers for detection of stress in plants or plant cells.

[0085] The present invention also provides methods of modifying stress tolerance of a crop plant comprising utilizing a SRP coding nucleic acid sequence to identify individual plants in populations segregating for either increased or decreased environmental stress tolerance (DNA marker).

[0086] In the said method of modifying stress tolerance of a plant the SRP encoding nucleic acid may be selected from the nucleic acids as disclosed in the Sequence Listing and/or homologs of the afore mentioned sequences. Further, the SRP coding nucleic acid used therein may at least about 50% homologous to one of the nucleic acids as disclosed in the Sequence Listing. Also an expression vector as described in the present invention might be used in the said method.

[0087] In a variant method of said method of modifying stress tolerance, the plant is transformed with an inducible promoter that directs expression of the SRP. For example, the promoter is tissue specific. In a variant method, the used promoter is developmentally regulated.

[0088] In a further embodiment, the method of modifying stress tolerance comprises one or more of the following steps: a) stabilizing a protein conferring the increased expression of a protein encoded by the nucleic acid molecule of the invention or of the polypeptide of the invention having the herein-mentioned activity of altering the metabolic activity; b) stabilizing a mRNA conferring the increased expression of a protein encoded by the nucleic acid molecule of the invention or its homologs or of a mRNA encoding the polypeptide of the present invention having the herein-mentioned activity of altering the metabolic activity; c) increasing the specific activity of a protein conferring the increased expression of a protein encoded by the nucleic acid molecule of the invention or of the polypeptide of the present invention or decreasing the inhibitory regulation of the polypeptide of the invention; d) generating or increasing the expression of an endogenous or artificial transcription factor mediating the expression of a protein conferring the increased expression of a protein encoded by the nucleic acid molecule of the invention or of the polypeptide of the invention having the herein-mentioned activity of altering the metabolic activity; e) stimulating activity of a protein conferring the increased expression of a protein encoded by the nucleic acid molecule of the present invention or a polypeptide of the present invention having the herein-mentioned activity of altering the metabolic activity by adding one or more exogenous inducing factors to the organisms or parts thereof; f) expressing a transgenic gene encoding a protein conferring the increased expression of a polypeptide encoded by the nucleic acid molecule of the present invention or a polypeptide of the present invention, having the herein-mentioned activity of altering the metabolic activity; and/or g) increasing the copy number of a gene conferring the increased expression of a nucleic acid molecule encoding a polypeptide encoded by the nucleic acid molecule of the invention or the polypeptide of the invention having the herein-mentioned activity of altering the metabolic activity; h) increasing the expression of the endogenous gene encoding the polypeptide of the invention or its homologs by adding positive expression or removing negative expression elements, e.g. homologous recombination can be used to either introduce positive regulatory elements like for plants the 35S enhancer into the promoter or to remove repressor elements form regulatory regions. Further gene conversion methods can be used to disrupt repressor elements or to enhance to activity of positive elements—positive elements can be randomly introduced in plants by T-DNA or transposon mutagenesis and lines can be identified in which the positive elements have be integrated near to a gene of the invention, the expression of which is thereby enhanced; and/or i) modulating growth conditions of the plant in such a manner, that the expression or activity of the gene encoding the protein of the invention or the protein itself is enhanced; and j) selecting of organisms with especially high activity of the proteins of the invention from natural or from mutagenized resources and breeding them into the target organisms, e.g. the elite crops.

[0089] Preferably, said mRNA is the nucleic acid molecule of the present invention and/or the protein conferring the increased expression of a protein encoded by the nucleic acid molecule of the present invention or the polypeptide having the herein mentioned activity is the polypeptide of the present invention, e.g. conferring increased tolerance to environmental stress by altering the metabolic activity.

[0090] In general, the amount of mRNA, polynucleotide, or nucleic acid molecule in a cell or a compartment of an organism correlates with the amount of encoded protein, and thus with the overall activity of the encoded protein in said volume. Said correlation is not always linear, the activity in the volume is dependent on the stability of the molecules, the degradation of the molecules or the presence of activating or inhibiting co-factors. Further, product inhibitions of enzymes are well known, e.g. Zinser et al. “Enzyminhibitoren/Enzyme inhibitors”.

[0091] The activity of the abovementioned proteins and/or polypeptide encoded by the nucleic acid molecule of the present invention can be increased in various ways. For example, the activity in an organism or in a part thereof, like a cell, is increased via increasing the gene product number, e.g. by increasing the expression rate, like introducing a stronger promoter, or by increasing the stability of the mRNA expressed, thus increasing the translation rate, and/or increasing the stability of the gene product, thus reducing the proteins decayed. Further, the activity or turnover of enzymes can be influenced in such a way that a reduction or increase of the reaction rate or a modification (reduction or increase) of the affinity to the substrate results, is reached. A mutation in the catalytic centre of an polypeptide of the invention, e.g. as enzyme, can modulate the turn over rate of the enzyme, e.g. a knock out of an essential amino acid can lead to a reduced or completely knock out activity of the enzyme, or the deletion or mutation of regulator binding sites can reduce a negative regulation like a feedback inhibition (or a substrate inhibition, if the substrate level is also increased). The specific activity of an enzyme of the present invention can be increased such that the turn over rate is increased or the binding of a co-factor is improved. Improving the stability of the encoding mRNA or the protein can also increase the activity of a gene product. The stimulation of the activity is also under the scope of the term “increased activity.”

[0092] Moreover, the regulation of the abovementioned nucleic acid sequences may be modified so that gene expression is increased. This can be achieved advantageously by means of heterologous regulatory sequences or by modifying, for example mutating, the natural regulatory sequences which are present. The advantageous methods may also be combined with each other.

[0093] In general, an activity of a gene product in an organism or part thereof, in particular in a plant cell, a plant, or a plant tissue or a part thereof or in a microorganism can be increased by increasing the amount of the specific encoding mRNA or the corresponding protein in said organism or part thereof. “Amount of protein or mRNA” is understood as meaning the molecule number of polypeptides or mRNA molecules in an organism, a tissue, a cell, or a cell compartment. “Increase” in the amount of a protein means the quantitative increase of the molecule number of said protein in an organism, a tissue, a cell or a cell compartment or part thereof—for example by one of the methods described herein below—in comparison to a wild type, control, or reference.

[0094] The increase in molecule number amounts preferably to at least 1%, preferably to more than 10%, more preferably to 30% or more, especially preferably to 50%, 70% or more, very especially preferably to 100%, most preferably to 500% or more. However, a de novo expression is also regarded as subject of the present invention.

[0095] A modification, i.e. an increase or decrease, can be caused by endogenous or exogenous factors. For example, an increase in activity in an organism or a part thereof can be caused by adding a gene product or a precursor or an activator or an agonist to the media or nutrition or can be caused by introducing said subjects into a organism, transient or stable.

[0096] In one embodiment the increase or decrease in metabolic activity in the plant or a part thereof, e.g. in a cell, a tissue, an organ, an organelle, etc., is achieved by increasing the endogenous level of the polypeptide of the invention. Accordingly, in an embodiment of the present invention, the present invention relates to a process, wherein the gene copy number of a gene encoding the polynucleotide or nucleic acid molecule of the invention is increased. Further, the endogenous level of the polypeptide of the invention can, for example, be increased by modifying the transcriptional or translational regulation of the polypeptide.

[0097] In one embodiment the metabolic activity in the plant or part thereof can be altered by targeted or random mutagenesis of the endogenous genes of the invention. For example homologous recombination can be used to either introduce positive regulatory elements like for plants the 35S enhancer into the promoter or to remove repressor elements form regulatory regions. In addition gene conversion like methods described by Kochevenko and Willmitzer (Plant Physiol. 2003 May; 132(1):174-84) and citations therein can be used to disrupt repressor elements or to enhance to activity of positive regulatory elements. Furthermore positive elements can be randomly introduced in (plant) genomes by T-DNA or transposon mutagenesis and lines can be screened for, in which the positive elements has be integrated near to a gene of the invention, the expression of which is thereby enhanced. The activation of plant genes by random integrations of enhancer elements has been described by Hayashi et al., 1992 (Science 258:1350-1353) or Weigel et al., 2000 (Plant Physiol. 122, 1003-1013) and others cited therein.

[0098] Reverse genetic strategies to identify insertions (which eventually carrying the activation elements) near in genes of interest have been described for various cases e.g. Krysan et al., 1999 (Plant Cell 1999, 11, 2283-2290); Sessions et al., 2002 (Plant Cell 2002, 14, 2985-2994); Young et al., 2001, (Plant Physiol. 2001, 125, 513-518); Koprek et al., 2000 (Plant J. 2000, 24, 253-263); Jeon et al., 2000 (Plant J. 2000, 22, 561-570); Tissier et al., 1999 (Plant Cell 1999, 11, 1841-1852); Speulmann et al., 1999 (Plant Cell 1999, 11, 1853-1866). Briefly material from all plants of a large T-DNA or transposon mutagenized plant population is harvested and genomic DNA prepared. Then the genomic DNA is pooled following specific architectures as described for example in Krysan et al., 1999 (Plant Cell 1999, 11, 2283-2290). Pools of genomics DNAs are then screened by specific multiplex PCR reactions detecting the combination of the insertional mutagen (e.g. T-DNA or Transposon) and the gene of interest. Therefore PCR reactions are run on the DNA pools with specific combinations of T-DNA or transposon border primers and gene specific primers. General rules for primer design can again be taken from Krysan et al., 1999 (Plant Cell 1999, 11, 2283-2290) Rescreening of lower levels DNA pools lead to the identification of individual plants in which the gene of interest is activated by the insertional mutagen.

[0099] The enhancement of positive regulatory elements or the disruption or weakening of negative regulatory elements can also be achieved through common mutagenesis techniques: The production of chemically or radiation mutated populations is a common technique and known to the skilled worker. Methods for plants are described by Koorneef et al. 1982 and the citations therein and by Lightner and Caspar in “Methods in Molecular Biology” Vol 82. These techniques usually induce point mutations that can be identified in any known gene using methods such as TILLING (Colbert et al. 2001).

[0100] Accordingly, the expression level can be increased if the endogenous genes encoding a polypeptide conferring an increased expression of the polypeptide of the present invention, in particular genes comprising the nucleic acid molecule of the present invention, are modified via homologous recombination, Tilling approaches or gene conversion

[0101] Regulatory sequences can be operatively linked to the coding region of an endogenous protein and control its transcription and translation or the stability or decay of the encoding mRNA or the expressed protein. In order to modify and control the expression, promoter, UTRs, splicing sites, processing signals, polyadenylation sites, terminators, enhancers, repressors, post transcriptional, or posttranslational modification sites can be changed, added, or amended For example, the activation of plant genes by random integrations of enhancer elements has been described by Hayashi et al., 1992 (Science 258:1350-1353) or Weigel et al., 2000 (Plant Physiol. 122, 1003-1013) and others cited therein. For example, the expression level of the endogenous protein can be modulated by replacing the endogenous promoter with a stronger transgenic promoter or by replacing the endogenous 3′UTR with a 3′UTR, which provides more stability without amending the coding region. Further, the transcriptional regulation can be modulated by introduction of an artificial transcription factor as described in the examples. Alternative promoters, terminators, and UTRs are described below.

[0102] The activation of an endogenous polypeptide having above-mentioned activity, e.g., conferring an increased tolerance to environmental stress after altering the metabolic activity, can also be increased by introducing a synthetic transcription factor, which binds close to the coding region of the protein of the invention-encoding gene and activates its transcription. A chimeric zinc finger protein can be construed, which comprises a specific DNA-binding domain and an activation domain as e.g. the VP16 domain of Herpes Simplex virus. The specific binding domain can bind to the regulatory region of the protein-coding region. The expression of the chimeric transcription factor in a plant leads to a specific expression of the protein of the invention, see e.g. in WO01/52620, Oriz, Proc. Natl. Acad. Sci. USA, 2002, Vol. 99, 13290 or Guan, Proc. Natl. Acad. Sci. USA, 2002, Vol. 99, 13296.

[0103] In one further embodiment of the method according to the invention, plants are used in which one of the abovementioned genes, or one of the above-mentioned nucleic acids, is mutated in a way that the activity of the encoded gene products is less influenced by cellular factors, or not at all, in comparison with the unmutated proteins. For example, well known regulation mechanism of enzymatic activity are substrate inhibition or feed back regulation mechanisms. Ways and techniques for the introduction of substitutions, deletions and additions of one or more bases, nucleotides or amino acids of a corresponding sequence are described herein below in the corresponding paragraphs and the references listed there, e.g. in Sambrook et al., Molecular Cloning, Cold Spring Harbor, N.Y., 1989. The person skilled in the art will be able to identify regulation domains and binding sites of regulators by comparing the sequence of the nucleic acid molecule of the present invention or the expression product thereof with the state of the art by computer software means which comprise algorithms for the identifying of binding sites and regulation domains or by introducing into a nucleic acid molecule or in a protein systematically mutations and assaying for those mutations which will lead to an increased specific activity or an increased activity per volume, in particular per cell.

[0104] It is therefore advantageously to express in a plant a nucleic acid molecule of the invention or a polypeptide of the invention derived from a evolutionary distantly related organism, as e.g. using a prokaryotic gene in a eukaryotic host, as in these cases the regulation mechanism of the host cell may not weaken the activity (cellular or specific) of the gene or its expression product The mutation is introduced in such a way that the production of the amino acids is not adversely affected.

[0105] Less influence on the regulation of a gene or its gene product is understood as meaning a reduced regulation of the enzymatic activity leading to an increased specific or cellular activity of the gene or its product. An increase of the enzymatic activity is understood as meaning an enzymatic activity, which is increased by at least 10%, advantageously at least 20, 30, or 40%, especially advantageously by at least 50, 60 or 70% in comparison with the starting organism.

[0106] The invention provides that the above methods can be performed such that the stress tolerance is increased. It is also possible to obtain a decrease in stress tolerance.

[0107] The invention is not limited to specific nucleic acids, specific polypeptides, specific cell types, specific host cells, specific conditions, or specific methods etc., as such, but may vary and numerous modifications and variations therein will be apparent to those skilled in the art. It is also to be understood that the terminology used herein is for the purpose of describing specific embodiments only and is not intended to be limiting.

[0108] The present invention also relates to isolated Stress Related Proteins (SRP), which are as disclosed in the Sequence Listing homologs thereof. Preferably, the isolated Stress Related Proteins (SRP) of the present invention are selected from yeast or E. coli. Further, the present invention is related to isolated Stress Related Protein (SRP) encoding nucleic acids selected from the group comprising the nucleic acid of the Sequence Listing and/or homologs thereof. Here, preferably, an isolated Stress Related Protein (SRP) encoding nucleic acid encodes an SRP, which is selected from yeast or E. coli.

[0109] The present invention provides stress-related gene sequences selected from the group consisting of the nucleic acid, as disclosed in the Sequence Listing of yeast, preferably from Saccharomyces cerevisiae or E. coli.

[0110] Homologs of the aforementioned sequences can be isolated advantageously from yeast, fungi, viruses, algae, bacteria, such as Acetobacter (subgen. Acetobacter) aceti; Acidithiobacillus ferrooxidans; Acinetobacter sp.; Actinobacillus sp; Aeromonas salmonicida; Agrobacterium tumefaciens; Aquifex aeolicus; Arcanobacterium pyogenes; Aster yellows phytoplasma; Bacillus sp.; Bifidobacterium sp.; Borrelia burgdorferi; Brevibacterium linens; Brucella melitensis; Buchnera sp.; Butyrivibrio fibrisolvens; Campylobacter jejuni; Caulobacter crescentus; Chlamydia sp.; Chlamydophila sp.; Chlorobium limicola; Citrobacter rodentium; Clostridium sp.; Comamonas testosteroni; Corynebacterium sp.; Coxiella burnetii; Deinococcus radiodurans; Dichelobacter nodosus; Edwardsiella ictaluri; Enterobacter sp.; Erysipelothrix rhusiopathiae; Escherichia coli; Flavobacterium sp.; Francisella tularensis; Frankia sp. CpI1; Fusobacterium nucleatum; Geobacillus stearothermophilus; Gluconobacter oxydans; Haemophilus sp.; Helicobacter pylori; Klebsiella pneumoniae; Lactobacillus sp.; Lactococcus lactis; Listeria sp.; Mannheimia haemolytica; Mesorhizobium loti; Methylophaga thalassica; Microcystis aeruginosa; Microscilla sp. PRE1; Moraxella sp. TA144; Mycobacterium sp.; Mycoplasma sp.; Neisseria sp.; Nitrosomonas sp.; Nostoc sp. PCC 7120; Novosphingobium aromaticivorans; Oenococcus oeni; Pantoea citrea; Pasteurella multocida; Pediococcus pentosaceus; Phormidium foveolarum; Phytoplasma sp.; Plectonema boryanum; Prevotella ruminicola; Propionibacterium sp.; Proteus vulgaris; Pseudomonas sp.; Ralstonia sp.; Rhizobium sp.; Rhodococcus equi; Rhodothermus marinus; Rickettsia sp.; Riemerella anatipestifer; Ruminococcus flavefaciens; Salmonella sp.; Selenomonas ruminantium; Serratia entomophila; Shigella sp.; Sinorhizobium meliloti; Staphylococcus sp.; Streptococcus sp.; Streptomyces sp.; Synechococcus sp.; Synechocystis sp. PCC 6803; Thermotoga maritima; Treponema sp.; Ureaplasma urealyticum; Vibrio cholerae; Vibrio parahaemolyticus; Xylella fastidiosa; Yersinia sp.; Zymomonas mobilis, preferably Salmonella sp. or Escherichia coli or plants, preferably from yeasts such as from the genera Saccharomyces, Pichia, Candida, Hansenula, Torulopsis or Schizosaccharomyces or plants such as Arabidopsis thaliana, maize, wheat, rye, oat, triticale, rice, barley, soybean, peanut, cotton, borage, sufflower, linseed, primrose, rapeseed, canola and turnip rape, manihot, pepper, sunflower, tagetes, solanaceous plant such as potato, tobacco, eggplant and tomato, Vicia species, pea, alfalfa, bushy plants such as coffee, cacao, tea, Salix species, trees such as oil palm, coconut, perennial grass, such as ryegrass and fescue, and forage crops, such as alfalfa and clover, and from spruce, pine, or fir, for example. More preferably homologs of aforementioned sequences can be isolated from Saccharomyces cerevisiae, E. coli or plants, preferably Brassica napus, Glycine max, or Oryza sativa.

[0111] The stress-related proteins of the present invention are preferably produced by recombinant DNA techniques. For example, a nucleic acid molecule encoding the protein is cloned into an expression vector, for example, into a binary vector, the expression vector is introduced into a host cell, for example, the Arabidopsis thaliana, wild-type NASC N906, or any other plant cell as described in the examples (see below), and the stress-related protein is expressed in said host cell. Examples for binary vectors are pBIN19, pBI101, pBinAR, pGPTV, pCAMBIA, pBIB-HYG, pBecks, pGreen or pPZP (Hajukiewicz, P. et al., 1994, Plant Mol. Biol., 25: 989-994 and Hellens et al, Trends in Plant Science (2000) 5, 446-451).

[0112] Advantageously, the nucleic acid sequences, according to the invention, or the gene construct, together with at least one reporter gene, are cloned into an expression cassette, which is introduced into the organism via a vector or directly into the genome. This reporter gene should allow easy detection via a growth, fluorescence, chemical, bioluminescence, or resistance assay or via a photometric measurement. Examples of reporter genes, which may be mentioned, are antibiotic- or herbicide-resistance genes, hydrolase genes, fluorescence protein genes, bioluminescence genes, sugar or nucleotide metabolic genes or biosynthesis genes such as the Ura3 gene, the IIv2 gene, the luciferase gene, the β-galactosidase gene, the gfp gene, the 2-desoxyglucose-6-phosphate phosphatase gene, the β-glucuronidase gene, β-lactamase gene, the neomycin phosphotransferase gene, the hygromycin phosphotransferase gene or the BASTA (=gluphosinate-resistance) gene. These genes permit easy measurement and quantification of the transcription activity and hence of the expression of the genes. In this way genome positions may be identified which exhibit differing productivity.

[0113] In a preferred embodiment, a nucleic acid construct, for example an expression cassette, comprises upstream, i.e. at the 5′ end of the encoding sequence, a promoter and downstream, i.e. at the 3′ end, a polyadenylation signal and optionally other regulatory elements, which are operably linked to the intervening encoding sequence with the nucleic acid of as disclosed in the Sequence Listing. By an operable linkage is meant the sequential arrangement of promoter, encoding sequence, terminator, and optionally other regulatory elements in such a way that each of the regulatory elements can fulfill its function in the expression of the encoding sequence in due manner. The sequences preferred for operable linkage are targeting sequences for ensuring subcellular localization in plastids. However, targeting sequences for ensuring subcellular localization in the mitochondrion, in the endoplasmic reticulum (=ER), in the nucleus, in oil corpuscles or other compartments may also be employed as well as translation promoters such as the 5′ lead sequence in tobacco mosaic virus (Gallie et al., Nucl. Acids Res. 15 (1987), 8693-8711).

[0114] A nucleic acid construct, for example an expression cassette may, for example, contain a constitutive promoter or a tissue-specific promoter (preferably the USP or napin promoter) the gene to be expressed and the ER retention signal. For the ER retention signal the KDEL (SEQ ID NO: 531) amino acid sequence (lysine, aspartic acid, glutamic acid, leucine) or the KKX amino acid sequence (lysine-lysine-X-stop, wherein X means every other known amino acid) is preferably employed.

[0115] For expression in a prokaryotic or eukaryotic host organism, for example, a microorganism, such as a fungus or a plant the expression cassette, is advantageously inserted into a vector such as by way of example a plasmid, a phage, or other DNA which allows optimum expression of the genes in the host organism. Examples of suitable plasmids are: in E. coli pLG338, pACYC184, pBR series such as e.g. pBR322, pUC series such as pUC18 or pUC19, M113 mp series, pKC30, pRep4, pHS1, pHS2, pPLc236, pMBL24, pLG200, pUR290, pIN-III¹¹³-B1, λgt11 or pBdCI; in Streptomyces pIJ101, pIJ364, pIJ702 or pIJ361; in Bacillus pUB110, pC194 or pBD214; in Corynebacterium pSA77 or pAJ667; in fungi pALS1, pIL2 or pBB116; other advantageous fungal vectors are described by Romanos, M. A. et al., ((1992) “Foreign gene expression in yeast: a review,” Yeast 8: 423-488) and by van den Hondel, C. A. M. J. J. et al. ((1991) “Heterologous gene expression in filamentous fungi,”) as well as in More Gene Manipulations in Fungi (J. W. Bennet & L. L. Lasure, eds., pp. 396-428: Academic Press: San Diego) and in “Gene transfer systems and vector development for filamentous fungi” (van den Hondel, C. A. M. J. J. & Punt, P. J. (1991) in: Applied Molecular Genetics of Fungi, Peberdy, J. F. et al., eds., pp. 1-28, Cambridge University Press: Cambridge). Examples of advantageous yeast promoters are 2 μM, pAG-1, YEp6, YEp13, or pEMBLYe23. Examples of algal or plant promoters are pLGV23, pGHlac⁺, pBIN19, pAK2004, pVKH or pDH51 (see Schmidt, R. and Willmitzer, L., 1988). The vectors identified above, or derivatives of the vectors identified above, are a small selection of the possible plasmids. Further plasmids are well known to those skilled in the art and may be found, for example, in the book Cloning Vectors (Eds. Pouwels P. H. et al. Elsevier, Amsterdam-New York-Oxford, 1985, ISBN 0 444 904018. Suitable plant vectors are described inter alia in “Methods in Plant Molecular Biology and Biotechnology”(CRC Press, Ch. 6/7, pp. 71-119). Advantageous vectors are known as shuttle vectors or binary vectors, which replicate in E. coli and Agrobacterium.

[0116] By vectors is meant, with the exception of plasmids, all other vectors known to those skilled in the art, such as by way of example phages, viruses such as SV40, CMV, baculovirus, adenovirus, transposons, IS elements, phasmids, phagemids, cosmids, linear, or circular DNA. These vectors can be replicated autonomously in the host organism or be chromosomally replicated, chromosomal replication being preferred.

[0117] In a further embodiment of the vector, the expression cassette, according to the invention, may also advantageously be introduced into the organisms in the form of a linear DNA and be integrated into the genome of the host organism by way of heterologous or homologous recombination. This linear DNA may be composed of a linearized plasmid or only of the expression cassette as vector or the nucleic acid sequences according to the invention.

[0118] In a further advantageous embodiment, the nucleic acid sequence, according to the invention, can also be introduced into an organism on its own.

[0119] If, in addition to the nucleic acid sequence according to the invention, further genes are to be introduced into the organism, all together with a reporter gene in a single vector, or each single gene with a reporter gene in a vector, in each case can be introduced into the organism, whereby the different vectors can be introduced simultaneously or successively.

[0120] The vector advantageously contains at least one copy of the nucleic acid sequences according to the invention and/or the expression cassette (=gene construct) according to the invention.

[0121] The invention further provides an isolated recombinant expression vector comprising a SRP nucleic acid as described above, wherein expression of the vector in a host cell results in increased tolerance to environmental stress as compared to a wild-type variety of the host cell. As used herein, the term “vector” refers to a nucleic acid molecule capable of transporting another nucleic acid, to which it has been linked. One type of vector is a “plasmid,” which refers to a circular double stranded DNA loop, into which additional DNA segments can be ligated. Another type of vector is a viral vector, wherein additional DNA segments can be ligated into the viral genome. Certain vectors are capable of autonomous replication in a host cell into which they are introduced (e.g., bacterial vectors having a bacterial origin of replication and episomal mammalian vectors). Other vectors (e.g., non-episomal mammalian vectors) are integrated into the genome of a host cell upon introduction into the host cell, and thereby are replicated along with the host genome. Moreover, certain vectors are capable of directing the expression of genes to which they are operatively linked. Such vectors are referred to herein as “expression vectors.” In general, expression vectors of utility in recombinant DNA techniques are often in the form of plasmids. In the present specification, “plasmid” and “vector” can be used interchangeably, as the plasmid is the most commonly used form of vector. However, the invention is intended to include such other forms of expression vectors, such as viral vectors (e.g., replication defective retroviruses, adenoviruses, and adeno-associated viruses), which serve equivalent functions.

[0122] The recombinant expression vectors of the invention comprise a nucleic acid of the invention in a form suitable for expression of the nucleic acid in a host cell, which means that the recombinant expression vectors include one or more regulatory sequences, selected on the basis of the host cells to be used for expression, which is operatively linked to the nucleic acid sequence to be expressed. As used herein, with respect to a recombinant expression vector, “operatively linked” is intended to mean that the nucleotide sequence of interest is linked to the regulatory sequence(s) in a manner which allows for expression of the nucleotide sequence (e.g., in an in vitro transcription/translation system or in a host cell when the vector is introduced into the host cell). The term “regulatory sequence” is intended to include promoters, enhancers, and other expression control elements (e.g., polyadenylation signals). Such regulatory sequences are described, for example, in Goeddel, Gene Expression Technology: Methods in Enzymology 185, Academic Press, San Diego, Calif. (1990) and Gruber and Crosby, in: Methods in Plant Molecular Biology and Biotechnology, eds. Glick and Thompson, Chapter 7, 89-108, CRC Press: Boca Raton, Fla., including the references therein. Regulatory sequences include those that direct constitutive expression of a nucleotide sequence in many types of host cells and those that direct expression of the nucleotide sequence only in certain host cells or under certain conditions. It will be appreciated by those skilled in the art that the design of the expression vector can depend on such factors as the choice of the host cell to be transformed, the level of expression of polypeptide desired, etc. The expression vectors of the invention can be introduced into host cells to thereby produce polypeptides or peptides, including fusion polypeptides or peptides, encoded by nucleic acids as described herein (e.g., SRPs, mutant forms of SRPs, fusion polypeptides, etc.)

[0123] The recombinant expression vectors of the invention can be designed for expression of SRPs in prokaryotic or eukaryotic cells. For example, SRP genes can be expressed in bacterial cells such as C. glutamicum, insect cells (using baculovirus expression vectors), yeast and other fungal cells (See Romanos, M. A. et al., 1992, Foreign gene expression in yeast: a review, Yeast 8:423-488; van den Hondel, C. A. M. J. J. et al., 1991, Heterologous gene expression in filamentous fungi, in: More Gene Manipulations in Fungi, J. W. Bennet & L. L. Lasure, eds., p. 396-428: Academic Press: San Diego; and van den Hondel, C. A. M. J. J. & Punt, P. J., 1991, Gene transfer systems and vector development for filamentous fungi, in: Applied Molecular Genetics of Fungi, Peberdy, J. F. et al., eds., p. 1-28, Cambridge University Press: Cambridge), algae (Falciatore et al., 1999, Marine Biotechnology 1(3):239-251), ciliates of the types: Holotrichia, Peritrichia, Spirotrichia, Suctoria, Tetrahymena, Paramecium, Colpidium, Glaucoma, Platyophrya, Potomacus, Pseudocohnilembus, Euplotes, Engelmaniella, and Stylonychia, especially of the genus Stylonychia lemnae with vectors following a transformation method as described in PCT Application No. WO 98/01572, and multicellular plant cells (See Schmidt, R. and Willmitzer, L., 1988, High efficiency Agrobacterium tumefaciens-mediated transformation of Arabidopsis thaliana leaf and cotyledon explants, Plant Cell Rep. 583-586; Plant Molecular Biology and Biotechnology, C Press, Boca Raton, Fla., chapter 6/7, S.71-119 (1993); F. F. White, B. Jenes et al., Techniques for Gene Transfer, in: Transgenic Plants, Vol. 1, Engineering and Utilization, eds. Kung and R. Wu, 128-43, Academic Press: 1993; Potrykus, 1991, Annu. Rev. Plant Physiol. Plant Molec. Biol. 42:205-225 and references cited therein) or mammalian cells. Suitable host cells are discussed further in Goeddel, Gene Expression Technology: Methods in Enzymology 185, Academic Press: San Diego, Calif. (1990). Alternatively, the recombinant expression vector can be transcribed and translated in vitro, for example using T7 promoter regulatory sequences and T7 polymerase.

[0124] Expression of polypeptides in prokaryotes is most often carried out with vectors containing constitutive or inducible promoters directing the expression of either fusion or non-fusion polypeptides. Fusion vectors add a number of amino acids to a polypeptide encoded therein, usually to the amino terminus of the recombinant polypeptide but also to the C-terminus or fused within suitable regions in the polypeptides. Such fusion vectors typically serve three purposes: 1) to increase expression of a recombinant polypeptide; 2) to increase the solubility of a recombinant polypeptide; and 3) to aid in the purification of a recombinant polypeptide by acting as a ligand in affinity purification. Often, in fusion expression vectors, a proteolytic cleavage site is introduced at the junction of the fusion moiety and the recombinant polypeptide to enable separation of the recombinant polypeptide from the fusion moiety subsequent to purification of the fusion polypeptide. Such enzymes, and their cognate recognition sequences, include Factor Xa, thrombin, and enterokinase.

[0125] By way of example the plant expression cassette can be installed in the pRT transformation vector ((a) Toepfer et al., 1993, Methods Enzymol., 217: 66-78; (b) Toepfer et al. 1987, Nucl. Acids. Res. 15: 5890 ff.).

[0126] Alternatively, a recombinant vector (=expression vector) can also be transcribed and translated in vitro, e.g. by using the T7 promoter and the T7 RNA polymerase.

[0127] Expression vectors employed in prokaryotes frequently make use of inducible systems with and without fusion proteins or fusion oligopeptides, wherein these fusions can ensue in both N-terminal and C-terminal manner or in other useful domains of a protein. Such fusion vectors usually have the following purposes: i) to increase the RNA expression rate; ii) to increase the achievable protein synthesis rate; iii) to increase the solubility of the protein; or iv) to simplify purification by means of a binding sequence usable for affinity chromatography. Proteolytic cleavage points are also frequently introduced via fusion proteins, which allow cleavage of a portion of the fusion protein and purification. Such recognition sequences for proteases are recognized, e.g. factor Xa, thrombin, and enterokinase.

[0128] Typical advantageous fusion and expression vectors are pGEX [Pharmacia Biotech Inc; Smith, D. B. and Johnson, K. S. (1988) Gene 67: 31-40], pMAL (New England Biolabs, Beverly, Mass.) and pRIT5 (Pharmacia, Piscataway, N.J.), which contains glutathione S-transferase (GST), maltose binding protein or protein A.

[0129] In one embodiment, the coding sequence of the SRP is cloned into a pGEX expression vector to create a vector encoding a fusion polypeptide comprising, from the N-terminus to the C-terminus, GST-thrombin cleavage site-X polypeptide. The fusion polypeptide can be purified by affinity chromatography using glutathione-agarose resin. Recombinant PKSRP unfused to GST can be recovered by cleavage of the fusion polypeptide with thrombin.

[0130] Other examples of E. coli expression vectors are pTrc (Amann et al., (1988) Gene 69:301-315) and pET vectors (Studier et al., Gene Expression Technology: Methods in Enzymology 185, Academic Press, San Diego, Calif. (1990) 60-89; Stratagene, Amsterdam, The Netherlands).

[0131] Target gene expression from the pTrc vector relies on host RNA polymerase transcription from a hybrid trp-lac fusion promoter. Target gene expression from the pET 11d vector relies on transcription from a T7 gn10-lac fusion promoter mediated by a co-expressed viral RNA polymerase (T7 gn1). This viral polymerase is supplied by host strains BL21(DE3) or HMS174(DE3) from a resident A prophage harboring a T7 gn1 gene under the transcriptional control of the lacUV 5 promoter.

[0132] One strategy to maximize recombinant polypeptide expression is to express the polypeptide in a host bacteria with an impaired capacity to proteolytically cleave the recombinant polypeptide (Gottesman, S., Gene Expression Technology: Methods in Enzymology 185, Academic Press, San Diego, Calif. (1990) 119-128). Another strategy is to alter the sequence of the nucleic acid to be inserted into an expression vector so that the individual codons for each amino acid are those preferentially utilized in the bacterium chosen for expression, such as C. glutamicum (Wada et al., 1992, Nucleic Acids Res. 20:2111-2118). Such alteration of nucleic acid sequences of the invention can be carried out by standard DNA synthesis techniques.

[0133] Other advantageous vectors for use in yeast are pYepSec1 (Baldari, et al., (1987) Embo J. 6:229-234), pMFa (Kurjan and Herskowitz, (1982) Cell 30:933-943), pJRY88 (Schultz et al., (1987) Gene 54:113-123), and pYES derivatives (Invitrogen Corporation, San Diego, Calif.). Vectors for use in filamentous fungi are described in: van den Hondel, C. A. M. J. J. & Punt, P. J. (1991) “Gene transfer systems and vector development for filamentous fungi,” in: Applied Molecular Genetics of Fungi, J. F. Peberdy, et al., eds., pp. 1-28, Cambridge University Press: Cambridge.

[0134] Alternatively, insect cell expression vectors can also be advantageously utilized, e.g. for expression in Sf 9 cells. These are e.g. the vectors of the pAc series (Smith et al. (1983) Mol. Cell Biol. 3:2156-2165) and the pVL series (Lucklow and Summers (1989) Virology 170:31-39).

[0135] Furthermore, plant cells or algal cells can advantageously be used for gene expression. Examples of plant expression vectors may be found in Becker, D., et al. (1992) “New plant binary vectors with selectable markers located proximal to the left border,” Plant Mol. Biol. 20: 1195-1197 or in Bevan, M. W. (1984) “Binary Agrobacterium vectors for plant transformation,” Nucl. Acid. Res. 12: 8711-8721.

[0136] Furthermore, the nucleic acid sequences may also be expressed in mammalian cells, advantageously in nonhuman mammalian cells. Examples of corresponding expression vectors are pCDM8 and pMT2PC referred to in: Seed, B. (1987) Nature 329:840 or Kaufman et al. (1987) EMBO J. 6: 187-195). At the same time promoters preferred for use are of viral origin, such as by way of example promoters of polyoma, adenovirus 2, cytomegalovirus, or simian virus 40. Other prokaryotic and eukaryotic expression systems are referred to in chapters 16 and 17 of Sambrook et al., Molecular Cloning: A Laboratory Manual, 2nd ed., Cold Spring Harbor Laboratory, Cold Spring Harbor Laboratory Press, Cold Spring Harbor, NY, 1989.

[0137] In a preferred embodiment of the present invention, the SRPs are expressed in plants and plants cells such as unicellular plant cells (e.g. algae) (See Falciatore et al., 1999, Marine Biotechnology 1(3):239-251 and references therein) and plant cells from higher plants (e.g., the spermatophytes, such as crop plants). A SRP may be “introduced” into a plant cell by any means, including transfection, transformation or transduction, electroporation, particle bombardment, agroinfection, and the like. One transformation method known to those of skill in the art is the dipping of a flowering plant into an Agrobacteria solution, wherein the Agrobacteria contains the SRP nucleic acid, followed by breeding of the transformed gametes.

[0138] Other suitable methods for transforming or transfecting host cells including plant cells can be found in Sambrook, et al., Molecular Cloning: A Laboratory Manual, 2nd ed., Cold Spring Harbor Laboratory, Cold Spring Harbor Laboratory Press, Cold Spring Harbor, N.Y., 1989, and other laboratory manuals such as Methods in Molecular Biology, 1995, Vol. 44, Agrobacterium protocols, ed: Gartland and Davey, Humana Press, Totowa, N.J. As biotic and abiotic stress tolerance is a general trait wished to be inherited into a wide variety of plants like maize, wheat, rye, oat, triticale, rice, barley, soybean, peanut, cotton, rapeseed and canola, manihot, pepper, sunflower and tagetes, solanaceous plants like potato, tobacco, eggplant, and tomato, Vicia species, pea, alfalfa, bushy plants (coffee, cacao, tea), Salix species, trees (oil palm, coconut), perennial grasses, and forage crops, these crop plants are also preferred target plants for a genetic engineering as one further embodiment of the present invention. Forage crops include, but are not limited to, Wheatgrass, Canarygrass, Bromegrass, Wildrye Grass, Bluegrass, Orchardgrass, Alfalfa, Salfoin, Birdsfoot Trefoil, Alsike Clover, Red Clover, and Sweet Clover.

[0139] In one embodiment of the present invention, transfection of an SRP into a plant is achieved by Agrobacterium-mediated gene transfer. Agrobacterium-mediated plant transformation can be performed using, for example, the GV3101(pMP90) (Koncz and Schell, 1986, Mol. Gen. Genet. 204:383-396) or LBA4404 (Clontech) Agrobacterium tumefaciens strain. Transformation can be performed by standard transformation and regeneration techniques (Deblaere et al., 1994, Nucl. Acids Res. 13:4777-4788; Gelvin, Stanton B. and Schilperoort, Robert A, Plant Molecular Biology Manual, 2^{nd} Ed. —Dordrecht: Kluwer Academic Publ., 1995. —in Sect., Ringbuc Zentrale Signatur: BT11-P ISBN 0-7923-2731-4; Glick, Bernard R.; Thompson, John E., Methods in Plant Molecular Biology and Biotechnology, Boca Raton: CRC Press, 1993 360 S., ISBN 0-8493-5164-2). For example, rapeseed can be transformed via cotyledon or hypocotyl transformation (Moloney et al., 1989, Plant cell Report 8:238-242; De Block et al., 1989, Plant Physiol. 91:694-701). Use of antibiotics for Agrobacterium and plant selection depends on the binary vector and the Agrobacterium strain used for transformation.

[0140] Rapeseed selection is normally performed using kanamycin as selectable plant marker. Agrobacterium-mediated gene transfer to flax can be performed using, for example, a technique described by Mlynarova et al., 1994, Plant Cell Report 13:282-285. Additionally, transformation of soybean can be performed using, for example, a technique described in European Patent No. 0424 047, U.S. Pat. No. 5,322,783, European Patent No. 0397 687, U.S. Pat. No. 5,376,543, or U.S. Pat. No. 5,169,770. Transformation of maize can be achieved by particle bombardment, polyethylene-glycol-mediated DNA uptake, or via the silicon carbide fiber technique. (See, for example, Freeling and Walbot, “The maize handbook” Springer Verlag: New York (1993) ISBN 3-540-97826-7). A specific example of maize transformation is found in U.S. Pat. No. 5,990,387, and a specific example of wheat transformation can be found in PCT Application No. WO 93/07256.

[0141] According to the present invention, the introduced SRP may be maintained in the plant cell stably if it is incorporated into a non-chromosomal autonomous replicon or integrated into the plant chromosomes. Alternatively, the introduced SRP may be present on an extra-chromosomal non-replicating vector and be transiently expressed or transiently active.

[0142] In one embodiment, a homologous recombinant microorganism can be created wherein the SRP is integrated into a chromosome, a vector is prepared, which contains at least a portion of a SRP gene into which a deletion, addition, or substitution has been introduced to thereby alter, e.g., functionally disrupt, the SRP gene. Preferably, the SRP gene is a yeast, E. coli, Brassica napus, Glycine max, or Oryza sativa SRP gene, but it can be a homolog from a related plant or even from a mammalian or insect source. In one embodiment, the vector is designed such that, upon homologous recombination, the endogenous SRP gene is functionally disrupted (i.e., no longer encodes a functional polypeptide; also referred to as a knock-out vector). Alternatively, the vector can be designed such that, upon homologous recombination, the endogenous SRP gene is mutated or otherwise altered but still encodes a functional polypeptide (e.g., the upstream regulatory region can be altered to thereby alter the expression of the endogenous SRP). To create a point mutation via homologous recombination, DNA-RNA hybrids can be used in a technique known as chimeraplasty (Cole-Strauss et al., 1999, Nucleic Acids Research 27(5):1323-1330 and Kmiec, 1999 Gene therapy American Scientist. 87(3):240-247). Homologous recombination procedures in Physcomitrella patens are also well known in the art and are contemplated for use herein.

[0143] Whereas in the homologous recombination vector, the altered portion of the SRP gene is flanked at its 5′ and 3′ ends by an additional nucleic acid molecule of the SRP gene to allow for homologous recombination to occur between the exogenous SRP gene carried by the vector and an endogenous SRP gene, in a microorganism or plant. The additional flanking SRP nucleic acid molecule is of sufficient length for successful homologous recombination with the endogenous gene. Typically, several hundreds of base pairs up to kilobases of flanking DNA (both at the 5′ and 3′ ends) are included in the vector. See, e.g., Thomas, K. R., and Capecchi, M. R., 1987, Cell 51:503 for a description of homologous recombination vectors or Strepp et al., 1998, PNAS, 95 (8):4368-4373 for cDNA based recombination in Physcomitrella patens). The vector is introduced into a microorganism or plant cell (e.g., via polyethylene glycol mediated DNA), and cells in which the introduced PKSRP gene has homologously recombined with the endogenous PKSRP gene are selected using art-known techniques.

[0144] In another embodiment, recombinant microorganisms can be produced that contain selected systems, which allow for regulated expression of the introduced gene. For example, inclusion of a SRP gene on a vector placing it under control of the lac operon permits expression of the SRP gene only in the presence of IPTG. Such regulatory systems are well known in the art.

[0145] Whether present in an extra-chromosomal non-replicating vector or a vector that is integrated into a chromosome, the SRP polynucleotide preferably resides in a plant expression cassette. A plant expression cassette preferably contains regulatory sequences capable of driving gene expression in plant cells that are operatively linked so that each sequence can fulfill its function, for example, termination of transcription by polyadenylation signals. Preferred polyadenylation signals are those originating from Agrobacterium tumefaciens t-DNA such as the gene 3 known as octopine synthase of the Ti-plasmid pTiACH5 (Gielen et al., 1984, EMBO J. 3:835) or functional equivalents thereof but also all other terminators functionally active in plants are suitable. As plant gene expression is very often not limited on transcriptional levels, a plant expression cassette preferably contains other operatively linked sequences like translational enhancers such as the overdrive-sequence containing the 5′-untranslated leader sequence from tobacco mosaic virus enhancing the polypeptide per RNA ratio (Gallie et al., 1987, Nucl. Acids Research 15:8693-8711). Examples of plant expression vectors include those detailed in: Becker, D. et al., 1992, New plant binary vectors with selectable markers located proximal to the left border, Plant Mol. Biol. 20: 1195-1197; and Bevan, M. W., 1984, Binary Agrobacterium vectors for plant transformation, Nucl. Acid. Res. 12:8711-8721; and Vectors for Gene Transfer in Higher Plants; in: Transgenic Plants, Vol. 1, Engineering and Utilization, eds.: Kung and R. Wu, Academic Press, 1993, S. 15-38.

[0146] “Transformation” is defined herein as a process for introducing heterologous DNA into a plant cell, plant tissue, or plant. It may occur under natural or artificial conditions using various methods well known in the art. Transformation may rely on any known method for the insertion of foreign nucleic acid sequences into a prokaryotic or eukaryotic host cell. The method is selected based on the host cell being transformed and may include, but is not limited to, viral infection, electroporation, lipofection, and particle bombardment. Such “transformed” cells include stably transformed cells in which the inserted DNA is capable of replication either as an autonomously replicating plasmid or as part of the host chromosome. They also include cells, which transiently express the inserted DNA or RNA for limited periods of time. Transformed plant cells, plant tissue, or plants are understood to encompass not only the end product of a transformation process, but also transgenic progeny thereof.

[0147] The terms “transformed,” “transgenic,” and “recombinant” refer to a host organism such as a bacterium or a plant into which a heterologous nucleic acid molecule has been introduced. The nucleic acid molecule can be stably integrated into the genome of the host or the nucleic acid molecule can also be present as an extrachromosomal molecule. Such an extrachromosomal molecule can be auto-replicating. Transformed cells, tissues, or plants are understood to encompass not only the end product of a transformation process, but also transgenic progeny thereof. A “non-transformed,” “non-transgenic,” or “non-recombinant” host refers to a wild-type organism, e.g., a bacterium or plant, which does not contain the heterologous nucleic acid molecule.

[0148] A “transgenic plant”, as used herein, refers to a plant, which contains a foreign nucleotide sequence inserted into either its nuclear genome or organelle genome. It encompasses further the offspring generations i.e. the T1-, T2- and consecutively generations or BC1-, BC2- and consecutively generation as well as crossbreeds thereof with non-transgenic or other transgenic plants.

[0149] The host organism (=transgenic organism) advantageously contains at least one copy of the nucleic acid according to the invention and/or of the nucleic acid construct according to the invention.

[0150] In principle all plants can be used as host organism. Preferred transgenic plants are, for example, selected from the families Aceraceae, Anacardiaceae, Apiaceae, Asteraceae, Brassicaceae, Cactaceae, Cucurbitaceae, Euphorbiaceae, Fabaceae, Malvaceae, Nymphaeaceae, Papaveraceae, Rosaceae, Salicaceae, Solanaceae, Arecaceae, Bromeliaceae, Cyperaceae, Iridaceae, Liliaceae, Orchidaceae, Gentianaceae, Labiaceae, Magnoliaceae, Ranunculaceae, Carifolaceae, Rubiaceae, Scrophulariaceae, Caryophyllaceae, Ericaceae, Polygonaceae, Violaceae, Juncaceae or Poaceae and preferably from a plant selected from the group of the families Apiaceae, Asteraceae, Brassicaceae, Cucurbitaceae, Fabaceae, Papaveraceae, Rosaceae, Solanaceae, Liliaceae or Poaceae. Preferred are crop plants such as plants advantageously selected from the group of the genus peanut, oilseed rape, canola, sunflower, safflower, olive, sesame, hazelnut, almond, avocado, bay, pumpkin/squash, linseed, soya, pistachio, borage, maize, wheat, rye, oats, sorghum and millet, triticale, rice, barley, cassava, potato, sugarbeet, egg plant, alfalfa, and perennial grasses and forage plants, oil palm, vegetables (brassicas, root vegetables, tuber vegetables, pod vegetables, fruiting vegetables, onion vegetables, leafy vegetables and stem vegetables), buckwheat, Jerusalem artichoke, broad bean, vetches, lentil, dwarf bean, lupin, clover and Lucerne for mentioning only some of them.

[0151] In one preferred embodiment, the host plant is selected from the families Aceraceae, Anacardiaceae, Apiaceae, Asteraceae, Brassicaceae, Cactaceae, Cucurbitaceae, Euphorbiaceae, Fabaceae, Malvaceae, Nymphaeaceae, Papaveraceae, Rosaceae, Salicaceae, Solanaceae, Arecaceae, Bromeliaceae, Cyperaceae, Iridaceae, Liliaceae, Orchidaceae, Gentianaceae, Labiaceae, Magnoliaceae, Ranunculaceae, Carifolaceae, Rubiaceae, Scrophulariaceae, Caryophyllaceae, Ericaceae, Polygonaceae, Violaceae, Juncaceae, or Poaceae, and preferably from a plant selected from the group of the families Apiaceae, Asteraceae, Brassicaceae, Cucurbitaceae, Fabaceae, Papaveraceae, Rosaceae, Solanaceae, Liliaceae or Poaceae. Preferred are crop plants and in particular plants mentioned herein above as host plants, such as the families and genera mentioned above, for example, preferred the species Anacardium occidentale, Calendula officinalis, Carthamus tinctorius, Cichorium intybus, Cynara scolymus, Helianthus annus, Tagetes lucida, Tagetes erecta, Tagetes tenuifolia; Daucus carota; Corylus avellana, Corylus colurna, Borago officinalis; Brassica napus, Brassica rapa ssp., Sinapis arvensis Brassica juncea, Brassica juncea var. juncea, Brassica juncea var. crispifolia, Brassica juncea var. foliosa, Brassica nigra, Brassica sinapioides, Melanosinapis communis, Brassica oleracea, Arabidopsis thaliana, Anana comosus, Ananas ananas, Bromelia comosa, Carica papaya, Cannabis sative, Ipomoea batatus, Ipomoea pandurata, Convolvulus batatas, Convolvulus tiliaceus, Ipomoea fastigiata, Ipomoea tiliacea, Ipomoea triloba, Convolvulus panduratus, Beta vulgaris, Beta vulgaris var. altissima, Beta vulgaris var. vulgaris, Beta maritima, Beta vulgaris var. perennis, Beta vulgaris var. conditiva, Beta vulgaris var. esculenta, Cucurbita maxima, Cucurbita mixta, Cucurbita pepo, Cucurbita moschata, Olea europaea, Manihot utilissima, Janipha manihot, Jatropha manihot, Manihot aipil, Manihot dulcis, Manihot manihot, Manihot melanobasis, Manihot esculenta, Ricinus communis, Pisum sativum, Pisum arvense, Pisum humile, Medicago sativa, Medicago falcata, Medicago varia, Glycine max Dolichos soja, Glycine gracilis, Glycine hispida, Phaseolus max, Soja hispida, Soja max, Cocos nucifera, Pelargonium grossularioides, Oleum cocoas, Laurus nobilis, Persea americana, Arachis hypogaea, Linum usitatissimum, Linum humile, Linum austriacum, Linum bienne, Linum angustifolium, Linum catharticum, Linum flavum, Linum grandiflorum, Adenolinum grandiflorum, Linum lewisii, Linum narbonense, Linum perenne, Linum perenne var. lewisii, Linum pratense, Linum trigynum, Punica granatum, Gossypium hirsutum, Gossypium arboreum, Gossypium barbadense, Gossypium herbaceum, Gossypium thurberi, Musa nana, Musa acuminata, Musa paradisiaca, Musa spp., Elaeis guineensis, Papaver orientate, Papaver rhoeas, Papaver dubium, Sesamum indicum, Piper aduncum, Piper amalago, Piper angustifolium, Piper auritum, Piper betel, Piper cubeba, Piper longum, Piper nigrum, Piper retrofractum, Artanthe adunca, Artanthe elongata, Peperomia elongata, Piper elongatum, Steffensia elongata, Hordeum vulgare, Hordeum jubatum, Hordeum murinum, Hordeum secalinum, Hordeum distichon Hordeum aegiceras, Hordeum hexastichon, Hordeum hexastichum, Hordeum irregulare, Hordeum sativum, Hordeum secalinum, Avena sativa, Avena fatua, Avena byzantina, Avena fatua var. sativa, Avena hybrida, Sorghum bicolor, Sorghum halepense, Sorghum saccharatum, Sorghum vulgare, Andropogon drummondii, Holcus bicolor, Holcus sorghum, Sorghum aethiopicum, Sorghum arundinaceum, Sorghum caffrorum, Sorghum cernuum, Sorghum dochna, Sorghum drummondii, Sorghum durra, Sorghum guineense, Sorghum lanceolatum, Sorghum nervosum, Sorghum saccharatum, Sorghum subglabrescens, Sorghum verticilliflorum, Sorghum vulgare, Holcus halepensis, Sorghum miliaceum millet, Panicum militaceum, Zea mays, Triticum aestivum, Triticum durum, Triticum turgidum, Triticum hybernum, Triticum macha, Triticum sativum or Triticum vulgare, Cofea spp., Coffea arabica, Coffea canephora, Coffea liberica, Capsicum annuum, Capsicum annuum var. glabriusculum, Capsicum frutescens, Capsicum annuum, Nicotiana tabacum, Solanum tuberosum, Solanum melongena, Lycopersicon esculentum, Lycopersicon lycopersicum, Lycopersicon pyriforme, Solanum integrifolium, Solanum lycopersicum Theobroma cacao or Camellia sinensis.

[0152] Anacardiaceae such as the genera Pistacia, Mangifera, Anacardium e.g. the species Pistacia vera (pistachios, Pistazie), Mangifer indica (Mango) or Anacardium occidentale (Cashew); Asteraceae, such as the genera Calendula, Carthamus, Centaurea, Cichorium, Cynara, Helianthus, Lactuca, Locusta, Tagetes, Valeriana, e.g., the species Calendula officinalis (Marigold), Carthamus tinctorius (safflower), Centaurea cyanus (cornflower), Cichorium intybus (blue daisy), Cynara scolymus (Artichoke), Helianthus annus (sunflower), Lactuca sativa, Lactuca crispa, Lactuca esculenta, Lactuca scariola L. ssp. sativa, Lactuca scariola L. var. integrata, Lactuca scariola L. var. integrifolia, Lactuca sativa subsp. romana, Locusta communis, Valeriana locusta (lettuce), Tagetes lucida, Tagetes erecta or Tagetes tenuifolia (Marigold); Apiaceae, such as the genera Daucus, e.g., the species Daucus carota (carrot); Betulaceae, such as the genera Corylus; e.g., the species Corylus avellana or Corylus colurna (hazelnut); Boraginaceae, such as the genera Borago, e.g., the species Borago officinalis (borage); Brassicaceae, such as the genera Brassica, Melanosinapis, Sinapis, Arabadopsis, e.g., the species Brassica napus, Brassica rapa ssp. (canola, oilseed rape, turnip rape), Sinapis arvensis Brassica juncea, Brassica juncea var. juncea, Brassica juncea var. crispifolia, Brassica juncea var. foliosa, Brassica nigra, Brassica sinapioides, Melanosinapis communis (mustard), Brassica oleracea (fodder beet) or Arabidopsis thaliana; Bromeliaceae, such as the genera Anana, Bromelia, e.g., the species Anana comosus, Ananas ananas or Bromelia comosa (pineapple); Caricaceae, such as the genera Carica, e.g., the species Carica papaya (papaya); Cannabaceae, such as the genera Cannabis, e.g., the species Cannabis sative (hemp); Convolvulaceae, such as the genera Ipomea, Convolvulus, e.g., the species Ipomoea batatus, Ipomoea pandurata, Convolvulus batatas, Convolvulus tiliaceus, Ipomoea fastigiata, Ipomoea tiliacea, Ipomoea triloba or Convolvulus panduratus (sweet potato, Man of the Earth, wild potato); Chenopodiaceae, such as the genera Beta, i.e., the species Beta vulgaris, Beta vulgaris var. altissima, Beta vulgaris var. Vulgaris, Beta maritima, Beta vulgaris var. perennis, Beta vulgaris var. conditiva or Beta vulgaris var. esculenta (sugar beet); Cucurbitaceae, such as the genera Cucubita, e.g., the species Cucurbita maxima, Cucurbita mixta, Cucurbita pepo or Cucurbita moschata (pumpkin, squash); Elaeagnaceae, such as the genera Elaeagnus, e.g., the species Olea europaea (olive); Ericaceae such as the genera Kalmia e.g. the species Kalmia latifolia, Kalmia angustifolia, Kalmia microphylla, Kalmia polifolia, Kalmia occidentalis, Cistus chamaerhodendros or Kalmia lucida (American laurel, broad-leafed laurel, calico bush, spoon wood, sheep laurel, alpine laurel, bog laurel, western bog-laurel, swamp-laurel); Euphorbiaceae, such as the genera Manihot, Janipha, Jatropha, Ricinus, e.g., the species Manihot utilissima, Janipha manihot, Jatropha manihot, Manihot aipil, Manihot dulcis, Manihot manihot, Manihot melanobasis, Manihot esculenta (manihot, arrowroot, tapioca, cassava) or Ricinus communis (castor bean, Castor Oil Bush, Castor Oil Plant, Palma Christi, Wonder Tree); Fabaceae, such as the genera Pisum, Albizia, Cathormion, Feuillea, Inga, Pithecolobium, Acacia, Mimosa, Medicajo, Glycine, Dolichos, Phaseolus, Soja, e.g., the species Pisum sativum, Pisum arvense, Pisum humile (pea), Albizia berteriana, Albizia julibrissin, Albizia lebbeck, Acacia berteriana, Acacia littoralis, Albizia berteriana, Albizzia berteriana, Cathormion berteriana, Feuillea berteriana, Inga fragrans, Pithecellobium berterianum, Pithecellobium fragrans, Pithecolobium berterianum, Pseudalbizzia berteriana, Acacia julibrissin, Acacia nemu, Albizia nemu, Feuillea julibrissin, Mimosa julibrissin, Mimosa speciosa, Sericanrda julibrissin, Acacia lebbeck, Acacia macrophylla, Albizia lebbek, Feuilleea lebbeck, Mimosa lebbeck, Mimosa speciosa (bastard logwood, silk tree, East Indian Walnut), Medicago sativa, Medicago falcata, Medicago varia (alfalfa) Glycine max Dolichos soja, Glycine gracilis, Glycine hispida, Phaseolus max, Soja hispida or Soja max (soybean); Geraniaceae, such as the genera Pelargonium, Cocos, Oleum, e.g., the species Cocos nucifera, Pelargonium grossularioides or Oleum cocois (coconut); Gramineae, such as the genera Saccharum, e.g., the species Saccharum officinarum; Juglandaceae, such as the genera Juglans, Wallia, e.g., the species Juglans regia, Juglans ailanthifolia, Juglans sieboldiana, Juglans cinerea, Wallia cinerea, Juglans bixbyi, Juglans californica, Juglans hindsii, Juglans intermedia, Juglans jamaicensis, Juglans major, Juglans microcarpa, Juglans nigra or Wallia nigra (walnut, black walnut, common walnut, persian walnut, white walnut, butternut, black walnut); Lauraceae, such as the genera Persea, Laurus, e.g., the species laurel Laurus nobilis (bay, laurel, bay laurel, sweet bay), Persea americana Persea americana, Persea gratissima or Persea persea (avocado); Leguminosae, such as the genera Arachis e.g. the species Arachis hypogaea (peanut); Linaceae, such as the genera Linum, Adenolinum, e.g., the species Linum usitatissimum, Linum humile, Linum austriacum, Linum bienne, Linum angustifolium, Linum catharticum, Linum flavum, Linum grandiflorum, Adenolinum grandiflorum, Linum lewisii, Linum narbonense, Linum perenne, Linum perenne var. lewisii, Linum pretense, or Linum trigynum (flax, linseed); Lythrarieae, such as the genera Punica, e.g., the species Punica granatum (pomegranate); Malvaceae, such as the genera Gossypium, e.g., the species Gossypium hirsutum, Gossypium arboreum, Gossypium barbadense, Gossypium herbaceum or Gossypium thurberi (cotton); Musaceae, such as the genera Musa, e.g., the species Musa nana, Musa acuminata, Musa paradisiaca, Musa spp. (banana); Onagraceae, such as the genera Camissonia, Oenothera, e.g., the species Oenothera biennis or Camissonia brevipes (primrose, evening primrose); Palmae, such as the genera Elacis, e.g., the species Elaeis guineensis (oil palm); Papaveraceae, such as the genera Papaver, e.g., the species Papaver orientale, Papaver rhoeas, Papaver dubium (poppy, oriental poppy, corn poppy, field poppy, shirley poppies, field poppy, long-headed poppy, long-pod poppy); Pedaliaceae, such as the genera Sesamum, e.g., the species Sesamum indicum (sesame); Piperaceae, such as the genera Piper, Artanthe, Peperomia, Steffensia, e.g., the species Piper aduncum, Piper amalago, Piper angustifolium, Piper auritum, Piper betel, Piper cubeba, Piper longum, Piper nigrum, Piper retrofractum, Artanthe adunca, Artanthe elongata, Peperomia elongata, Piper elongatum, Steffensia elongata (Cayenne pepper, wild pepper); Poaceae, such as the genera Hordeum, Secale, Avena, Sorghum, Andropogon, Holcus, Panicum, Oryza, Zea, Triticum, e.g., the species Hordeum vulgare, Hordeum jubatum, Hordeum murinum, Hordeum secalinum, Hordeum distichon, Hordeum aegiceras, Hordeum hexastichon, Hordeum hexastichum, Hordeum irregulare, Hordeum sativum, Hordeum secalinum (barley, pearl barley, foxtail barley, wall barley, meadow barley), Secale cereale (rye), Avena sativa, Avena fatua, Avena byzantina, Avena fatua var. sativa, Avena hybrida (oat), Sorghum bicolor, Sorghum halepense, Sorghum saccharatum, Sorghum vulgare, Andropogon drummondii, Holcus bicolor, Holcus sorghum, Sorghum aethiopicum, Sorghum arundinaceum, Sorghum caffrorum, Sorghum cernuum, Sorghum dochna, Sorghum drummondii, Sorghum durra, Sorghum guineense, Sorghum lanceolatum, Sorghum nervosum, Sorghum saccharatum, Sorghum subglabrescens, Sorghum verticilliflorum, Sorghum vulgare, Holcus halepensis, Sorghum miliaceum millet, Panicum militaceum (Sorghum, millet), Oryza sativa, Oryza latifolia (rice), Zea mays (corn, maize) Triticum aestivum, Triticum durum, Triticum turgidum, Triticum hybernum, Triticum macha, Triticum sativum or Triticum vulgare (wheat, bread wheat, common wheat), Proteaceae, such as the genera Macadamia, e.g., the species Macadamia intergrifolia (macadamia); Rubiaceae, such as the genera Coffea, e.g., the species Cofea spp., Coffea arabica, Coffea canephora or Coffea liberica (coffee); Scrophulariaceae, such as the genera Verbascum, e.g., the species Verbascum blattaria, Verbascum chaixii, Verbascum densiflorum, Verbascum lagurus, Verbascum longifolium, Verbascum lychnitis, Verbascum nigrum, Verbascum olympicum, Verbascum phlomoides, Verbascum phoenicum, Verbascum pulverulentum, or Verbascum thapsus (mullein, white moth mullein, nettle-leaved mullein, dense-flowered mullein, silver mullein, long-leaved mullein, white mullein, dark mullein, greek mullein, orange mullein, purple mullein, hoary mullein, great mullein); Solanaceae, such as the genera Capsicum, Nicotiana, Solanum, Lycopersicon, e.g., the species Capsicum annuum, Capsicum annuum var. glabriusculum, Capsicum frutescens (pepper), Capsicum annuum (paprika), Nicotiana tabacum, Nicotiana alata, Nicotiana attenuata, Nicotiana glauca, Nicotiana langsdorffii, Nicotiana obtusifolia, Nicotiana quadrivalvis, Nicotiana repanda, Nicotiana rustica, Nicotiana sylvestris (tobacco), Solanum tuberosum (potato), Solanum melongena (egg-plant) (Lycopersicon esculentum, Lycopersicon lycopersicum, Lycopersicon pyriforme, Solanum integrifolium, or Solanum lycopersicum (tomato); Sterculiaceae, such as the genera Theobroma, e.g., the species Theobroma cacao (cacao); Theaceae, such as the genera Camellia, e.g., the species Camellia sinensis) (tea). The introduction of the nucleic acids according to the invention, the expression cassette, or the vector into organisms, plants for example, can in principle be done by all of the methods known to those skilled in the art. The introduction of the nucleic acid sequences gives rise to recombinant or transgenic organisms.

[0153] In the case of microorganisms, those skilled in the art can find appropriate methods in the textbooks by Sambrook, J. et al. (1989) Molecular cloning: A laboratory manual, Cold Spring Harbor Laboratory Press, by F. M. Ausubel et al. (1994) Current protocols in molecular biology, John Wiley and Sons, by D. M. Glover et al., DNA Cloning Vol. 1, (1995), IRL Press (ISBN 019-963476-9), by Kaiser et al. (1994) Methods in Yeast Genetics, Cold Spring Harbor Laboratory Press or Guthrie et al. Guide to Yeast Genetics and Molecular Biology, Methods in Enzymology, 1994, Academic Press.

[0154] The transfer of foreign genes into the genome of a plant is called transformation. In doing this the methods described for the transformation and regeneration of plants from plant tissues or plant cells are utilized for transient or stable transformation. Suitable methods are protoplast transformation by poly(ethylene glycol)-induced DNA uptake, the “biolistic” method using the gene cannon—referred to as the particle bombardment method, electroporation, the incubation of dry embryos in DNA solution, microinjection and gene transfer mediated by Agrobacterium. Said methods are described by way of example in B. Jenes et al., Techniques for Gene Transfer, in: Transgenic Plants, Vol. 1, Engineering and Utilization, eds. S. D. Kung and R. Wu, Academic Press (1993) 128-143 and in Potrykus Annu. Rev. Plant Physiol. Plant Molec. Biol. 42 (1991) 205-225). The nucleic acids or the construct to be expressed is preferably cloned into a vector, which is suitable for transforming Agrobacterium tumefaciens, for example pBin19 (Bevan et al., Nucl. Acids Res. 12 (1984) 8711). Agrobacteria transformed by such a vector can then be used in known manner for the transformation of plants, in particular of crop plants such as by way of example tobacco plants, for example by bathing bruised leaves or chopped leaves in an agrobacterial solution and then culturing them in suitable media. The transformation of plants by means of Agrobacterium tumefaciens is described, for example, by Hofgen and Willmitzer in Nucl. Acid Res. (1988) 16, 9877 or is known inter alia from F. F. White, Vectors for Gene Transfer in Higher Plants; in Transgenic Plants, Vol. 1, Engineering and Utilization, eds., S. D. Kung and R. Wu, Academic Press, 1993, pp. 15-38.

[0155] Agrobacteria transformed by an expression vector according to the invention may likewise be used in known manner for the transformation of plants such as test plants like Arabidopsis or crop plants such as cereal crops, corn, oats, rye, barley, wheat, soybean, rice, cotton, sugar beet, canola, sunflower, flax, hemp, potatoes, tobacco, tomatoes, carrots, paprika, oilseed rape, tapioca, cassava, arrowroot, tagetes, alfalfa, lettuce and the various tree, nut and vine species, in particular of oil-containing crop plants such as soybean, peanut, castor oil plant, sunflower, corn, cotton, flax, oilseed rape, coconut, oil palm, safflower (Carthamus tinctorius) or cocoa bean, e.g. by bathing bruised leaves or chopped leaves in an agrobacterial solution and then culturing them in suitable media.

[0156] The genetically modified plant cells may be regenerated by all of the methods known to those skilled in the art. Appropriate methods can be found in the publications referred to above by S. D. Kung and R. Wu, Potrykus or Höfgen and Willmitzer.

[0157] Accordingly, a further aspect of the invention relates to transgenic organisms transformed by at least one nucleic acid sequence, expression cassette or vector according to the invention as well as cells, cell cultures, tissue, parts—such as, for example, leaves, roots, etc. in the case of plant organisms—or reproductive material derived from such organisms. The terms “host organism,” “host cell,” “recombinant (host) organism,” and “transgenic (host) cell” are used here interchangeably. Of course, these terms relate not only to the particular host organism or the particular target cell, but also to the descendants or potential descendants of these organisms or cells. Since, due to mutation or environmental effects, certain modifications may arise in successive generations, these descendants need not necessarily be identical with the parental cell but, nevertheless, are still encompassed by the term as used here.

[0158] For the purposes of the invention “transgenic” or “recombinant” means with regard for example to a nucleic acid sequence, an expression cassette (=gene construct, nucleic acid construct) or a vector containing the nucleic acid sequence according to the invention or an organism transformed by the nucleic acid sequences, expression cassette, or vector according to the invention all those constructions produced by genetic engineering methods in which either: a) the nucleic acid sequence as disclosed in the Sequence Listing or its derivatives or parts thereof; or b) a genetic control sequence functionally linked to the nucleic acid sequence described under (a), for example a 3′- and/or 5′-genetic control sequence such as a promoter or terminator, or c) (a) and (b), are not found in their natural, genetic environment or have been modified by genetic engineering methods, wherein the modification may by way of example be a substitution, addition, deletion, inversion or insertion of one or more nucleotide residues. Natural genetic environment means the natural genomic or chromosomal locus in the organism of origin or inside the host organism or presence in a genomic library. In the case of a genomic library the natural genetic environment of the nucleic acid sequence is preferably retained at least in part. The environment borders the nucleic acid sequence at least on one side and has a sequence length of at least 50 bp, preferably at least 500 bp, particularly preferably at least 1,000 bp, most particularly preferably at least 5,000 bp. A naturally occurring expression cassette—for example, the naturally occurring combination of the natural promoter of the nucleic acid sequence according to the invention with the corresponding Δ-8-desaturase, Δ-9-elongase and/or Δ-5-desaturase gene—turns into a transgenic expression cassette when the latter is modified by unnatural, synthetic (“artificial”) methods, such as, by way of example, a mutagenation. Appropriate methods are described by way of example in U.S. Pat. No. 5,565,350 or WO 00/15815.

[0159] Suitable organisms or host organisms for the nucleic acid, expression cassette, or vector according to the invention are advantageously in principle all organisms, which are suitable for the expression of recombinant genes as described above. Further examples which may be mentioned are plants such as Arabidopsis, Asteraceae such as Calendula, or crop plants such as soybean, peanut, castor oil plant, sunflower, flax, corn, cotton, flax, oilseed rape, coconut, oil palm, safflower (Carthamus tinctorius) or cocoa bean.

[0160] A further object of the invention relates to the use of a nucleic acid construct, e.g. an expression cassette, containing DNA sequences encoding polypeptides disclosed in the Sequence Listing or DNA sequences hybridizing therewith for the transformation of plant cells, tissues or parts of plants.

[0161] In doing so, depending on the choice of promoter, the sequences as disclosed in the Sequence Listing can be expressed specifically in the leaves, in the seeds, the nodules, in roots, in the stem or other parts of the plant. Those transgenic plants overproducing sequences disclosed in the Sequence Listing, the reproductive material thereof, together with the plant cells, tissues, or parts thereof are a further object of the present invention.

[0162] The expression cassette or the nucleic acid sequences or construct according to the invention containing sequences as disclosed in the Sequence Listing can, moreover, also be employed for the transformation of the organisms identified by way of example above such as bacteria, yeasts, filamentous fungi and plants.

[0163] Within the framework of the present invention, altering metabolic activity means, for example, the artificially acquired trait of increased biosynthetic performance due to functional over expression of sequences disclosed in the Sequence Listing in the organisms according to the invention, advantageously in the transgenic plants according to the invention, by comparison with the nongenetically modified initial plants at least for the duration of at least one plant generation.

[0164] A constitutive expression of the exogenous sequences disclosed in the Sequence Listing is, moreover, advantageous. On the other hand, however, an inducible expression may also appear desirable.

[0165] The efficiency of the expression of the sequences disclosed in the Sequence Listing can be determined, for example, in vitro by shoot meristem propagation. In addition, an expression of the sequences disclosed in the Sequence Listing modified in nature and level and its effect on the metabolic pathways performance can be tested on test plants in greenhouse trials.

[0166] An additional object of the invention comprises transgenic organisms such as transgenic plants transformed by an expression cassette containing sequences disclosed in the Sequence Listing according to the invention or DNA sequences hybridizing therewith, as well as transgenic cells, tissue, parts and reproduction material of such plants. Particular preference is given in this case to transgenic crop plants, such as by way of example barley, wheat, rye, oats, corn, soybean, rice, cotton, sugar beet, oilseed rape and canola, sunflower, flax, hemp, thistle, potatoes, tobacco, tomatoes, tapioca, cassava, arrowroot, alfalfa, lettuce and the various tree, nut, and vine species.

[0167] For the purposes of the invention, plants are mono- and dicotyledonous plants, mosses or algae.

[0168] A further refinement, according to the invention, is transgenic plants, as described above, which contain a nucleic acid sequence or construct according to the invention or an expression cassette according to the invention.

[0169] Furthermore, by derivatives is meant homologues of the sequences disclosed in the Sequence Listing, for example eukaryotic homologues, truncated sequences, single-stranded DNA of the encoding and nonencoding DNA sequence or RNA of the encoding and nonencoding DNA sequence.

[0170] In addition, by homologues of the sequences disclosed in the Sequence Listing is meant derivatives such as by way of example promoter variants. These variants may be modified by one or more nucleotide exchanges, by insertion(s) and/or deletion(s) without, however, adversely affecting the functionality or efficiency of the promoters. Furthermore, the promoters can have their efficiency increased by altering their sequence or be completely replaced by more effective promoters even of foreign organisms.

[0171] By derivatives is also advantageously meant variants whose nucleotide sequence has been altered in the region from −1 to −2000 ahead of the start codon in such a way that the gene expression and/or the protein expression is modified, preferably increased. Furthermore, by derivatives is also meant variants, which have been modified at the 3′ end.

[0172] Suitable promoters in the expression cassette are in principle all promoters which can control the expression of foreign genes in organisms such as microorganisms like protozoa such as ciliates, algae such as green, brown, red or blue algae such as Euglenia, bacteria such as gram-positive or gram-negative bacteria, yeasts such as Saccharomyces, Pichia or Schizosaccharomyces or fungi such as Mortierella, Thraustochytrium or Schizochytrium or plants, advantageously in plants or fungi. Use is preferably made in particular of plant promoters or promoters derived from a plant virus. Advantageous regulation sequences for the method according to the invention are found for example in promoters, such as cos, tac, trp, tet, trp-tet, lpp, lac, lpp-lac, lacIq-, T7, T5, T3, gal, trc, ara, SP6, λ-PR or in λ-PL promoters which are employed advantageously in gram-negative bacteria. Other advantageous regulation sequences are found, for example, in the gram-positive promoters amy and SPO2, in the yeast or fungal promoters ADC1, MFα, AC, P-60, CYC1, GAPDH, TEF, rp28, ADH or in the plant promoters CaMV/35S [Franck et al., Cell 21 (1980) 285-294], SSU, OCS, lib4, STLS1, B33, nos (=Nopalin Synthase Promoter) or in the ubiquitin or phaseolin promoter. The expression cassette may also contain a chemically inducible promoter by means of which the expression of the sequences disclosed in the Sequence Listing transformed into the organisms can be controlled advantageously in the plants at a particular time. Advantageous plant promoters of this type are by way of example the PRP1 promoter (Ward et al., Plant. Mol. Biol. 22(1993), 361-366), a promoter inducible by benzenesulfonamide (EP 388186), a promoter inducible by tetracycline [Gatz et al., (1992) Plant J. 2, 397-404], a promoter inducible by salicylic acid (WO 95/19443), a promoter inducible by abscisic acid (EP 335528) and a promoter inducible by ethanol or cyclohexanone (WO93/21334). Other examples of plant promoters, which can advantageously be used, are the promoter of cytosolic FBPase from potato, the ST-LSI promoter from potato (Stockhaus et al., EMBO J. 8 (1989) 2445-245), the promoter of phosphoribosyl pyrophosphate amidotransferase from Glycine max (see also gene bank accession number U87999) or a nodiene-specific promoter as described in EP 249676. Particularly advantageous are those plant promoters, which ensure expression in tissues, or plant parts/organs, in which fatty acid biosynthesis or the precursor stages thereof occurs, as in endosperm or in the developing embryo for example. Particularly noteworthy are advantageous promoters, which ensure seed-specific expression, such as, by way of example, the USP promoter or derivatives thereof, the LEB4 promoter, the phaseolin promoter, or the napin promoter. The particularly advantageous USP promoter cited according to the invention or its derivatives mediate very early gene expression in seed development (Baeumlein et al., Mol Gen Genet, 1991, 225 (3): 459-67). Other advantageous seed-specific promoters which may be used for monocotylodonous or dicotylodonous plants are the promoters suitable for dicots such as napin gene promoters, likewise cited by way of example, from oilseed rape (U.S. Pat. No. 5,608,152), the oleosin promoter from Arabidopsis (WO 98/45461), the phaseolin promoter from Phaseolus vulgaris (U.S. Pat. No. 5,504,200), the Bce4 promoter from Brassica (WO 91/13980) or the leguminous B4 promoter (LeB4, Baeumlein et al., Plant J., 2, 2, 1992: 233-239) or promoters suitable for monocotylodons such as the promoters of the Ipt2 or Ipt1 gene in barley (WO 95/15389 and WO 95/23230) or the promoters of the barley hordeine gene, the rice glutelin gene, the rice oryzin gene, the rice prolamin gene, the wheat gliadin gene, the white glutelin gene, the corn zein gene, the oats glutelin gene, the sorghum kasirin gene or the rye secalin gene which are described in WO99/16890.

[0173] Furthermore, particularly preferred are those promoters, which ensure the expression in tissues, or plant parts in which, for example, the biosynthesis of fatty acids, oils and lipids or the precursor stages thereof takes place. Particularly noteworthy are promoters, which ensure a seed-specific expression. Noteworthy are the promoter of the napin gene from oilseed rape (U.S. Pat. No. 5,608,152), the USP promoter from Vicia faba (USP=unknown seed protein, Baeumlein et al., Mol Gen Genet, 1991, 225 (3): 459-67), the promoter of the oleosin gene from Arabidopsis (WO98/45461), the phaseolin promoter (U.S. Pat. No. 5,504,200) or the promoter of the legumin B4 gene (LeB4; Baeumlein et al., 1992, Plant Journal, 2 (2): 233-9). Other promoters to be mentioned are that of the Ipt2 or Ipt1 gene from barley (WO95/15389 and WO95/23230), which mediate seed-specific expression in monocotyledonous plants. Other advantageous seed specific promoters are promoters such as the promoters from rice, corn or wheat disclosed in WO 99/16890 or Amy32b, Amy6-6 or aleurain (U.S. Pat. No. 5,677,474), Bce4 (rape, U.S. Pat. No. 5,530,149), glycinin (soy bean, EP 571741), phosphoenol pyruvat carboxylase (soy bean, JP 06/62870), ADR12-2 (soy bean, WO 98/08962), isocitratlyase (rape, U.S. Pat. No. 5,689,040) or β-amylase (barley, EP 781 849).

[0174] As described above, the expression construct (=gene construct, nucleic acid construct) may contain yet other genes, which are to be introduced into the organisms. These genes can be subject to separate regulation or be subject to the same regulation region as sequences disclosed in the Sequence Listing. These genes are by way of example other biosynthesis genes, advantageously for fatty acid biosynthesis, vitamin biosynthesis etc. that allow increased synthesis.

[0175] In principle all natural promoters with their regulation sequences can be used like those named above for the expression cassette according to the invention and the method according to the invention. Over and above this, synthetic promoters may also advantageously be used.

[0176] In the preparation of an expression cassette various DNA fragments can be manipulated in order to obtain a nucleotide sequence, which usefully reads in the correct direction and is equipped with a correct reading raster. To connect the DNA fragments (=nucleic acids according to the invention) to one another adaptors or linkers may be attached to the fragments.

[0177] The promoter and the terminator regions can usefully be provided in the transcription direction with a linker or polylinker containing one or more restriction points for the insertion of this sequence. Generally, the linker has 1 to 10, mostly 1 to 8, preferably 2 to 6, restriction points. In general the size of the linker inside the regulatory region is less than 100 bp, frequently less than 60 bp, but at least 5 bp. The promoter may be both native or homologous, as well as foreign or heterologous to the host organism, for example to the host plant. In the 5′-3′ transcription direction the expression cassette contains the promoter, a DNA sequence which encodes a nucleic acid disclosed herein and a region for transcription termination. Different termination regions can be exchanged for one another in any desired fashion.

[0178] Furthermore, manipulations which provide suitable restriction interfaces, or which remove excess DNA or restriction interfaces can be employed. Where insertions, deletions, or substitutions, such as transitions and transversions, come into consideration, in vitro mutagenesis, primer repair, restriction or ligation may be used. In suitable manipulations such as restriction, chewing back or filling of overhangs for blunt ends complementary ends of the fragments can be provided for the ligation.

[0179] For an advantageous high expression the attachment of the specific ER retention signal SEKDEL (SEQ ID NO: 532) inter alia can be of importance (Schouten, A. et al., Plant Mol. Biol. 30 (1996), 781-792). In this way the average expression level is tripled or even quadrupled. Other retention signals, which occur naturally in plant and animal proteins located in the ER may also be employed for the construction of the cassette. In another preferred embodiment a plastidial targeting sequence is used as described by Napier J. A. (Targeting of foreign proteins to the chloroplast, Methods Mol. Biol., 49, 1995: 369-376). A preferred used vector comprising said plastidial targeting sequence is disclosed by Colin Lazarus [Guerineau F., Woolston S., Brooks L., Mullineaux P. “An expression cassette for targeting foreign proteins into chloroplast; Nucleic. Acids Res., December 9, 16 (23), 1988: 11380].

[0180] Preferred polyadenylation signals are plant polyadenylation signals, preferably those which substantially correspond to T-DNA polyadenylation signals from Agrobacterium tumefaciens, in particular gene 3 of the T-DNA (octopin synthase) of the Ti plasmid pTiACH5 (Gielen et al., EMBO J. 3 (1984), 835 et seq.) or corresponding functional equivalents.

[0181] An expression cassette is produced by fusion of a suitable promoter with suitable sequences disclosed in the Sequence Listing together with a polyadenylation signal by common recombination and cloning techniques as described, for example, in T. Maniatis, E. F. Fritsch and J. Sambrook, Molecular Cloning: A Laboratory Manual, Cold Spring Harbor Laboratory, Cold Spring Harbor, N.Y. (1989) as well as in T. J. Silhavy, M. L. Berman and L. W. Enquist, Experiments with Gene Fusions, Cold Spring Harbor Laboratory, Cold Spring Harbor, N.Y. (1984) and in Ausubel, F. M. et al., Current Protocols in Molecular Biology, Greene Publishing Assoc. and Wiley-Interscience (1987).

[0182] In the preparation of an expression cassette various DNA fragments can be manipulated to produce a nucleotide sequence, which usefully reads in the correct direction and is equipped with a correct reading raster. Adapters or linkers can be attached to the fragments for joining the DNA fragments.

[0183] The promoter and the terminator regions can usefully be provided in the transcription direction with a linker or polylinker containing one or more restriction points for the insertion of this sequence. Generally, the linker has 1 to 10, mostly 1 to 8, preferably 2 to 6, restriction points. In general the size of the linker inside the regulatory region is less than 100 bp, frequently less than 60 bp, but at least 5 bp. The promoter may be both native or homologous as well as foreign or heterologous to the host organism, for example to the host plant. In the 5′-3′ transcription direction the expression cassette contains the promoter, a DNA sequence, which either encodes a nucleic acid disclosed in the Sequence Listing and a region for transcription termination. Different termination regions can be exchanged for one another in any desired fashion.

[0184] In the preparation of an expression cassette various DNA fragments can be manipulated to produce a nucleotide sequence, which usefully reads in the correct direction and is equipped with a correct reading raster. Adapters or linkers can be attached to the fragments for joining the DNA fragments.

[0185] The DNA sequences encoding the nucleic acid sequences used in the inventive processes such as the sequences disclosed in the Sequence Listing contain all the sequence characteristics needed to achieve correct localization of respective biosynthesis. Accordingly, no further targeting sequences are needed per se. However, such localization may be desirable and advantageous and hence artificially modified or reinforced so that such fusion constructs are also a preferred advantageous embodiment of the invention.

[0186] Particularly preferred are sequences, which ensure targeting in plastids. Under certain circumstances targeting into other compartments (reported in: Kermode, Crit. Rev. Plant Sci. 15, 4 (1996), 285-423) may also be desirable, e.g. into vacuoles, the mitochondria, the endoplasmic reticulum (ER), peroxisomes, lipid structures or due to lack of corresponding operative sequences retention in the compartment of origin, the cytosol.

[0187] As used herein, the term “environmental stress” refers to any sub-optimal growing condition and includes, but is not limited to, sub-optimal conditions associated with salinity, drought, temperature, metal, chemical, pathogenic and oxidative stresses, or combinations thereof. In preferred embodiments, the environmental stress can be salinity, drought, heat, or low temperature, or combinations thereof, and in particular, can be low water content or low temperature. Wherein drought stress means any environmental stress which leads to a lack of water in plants or reduction of water supply to plants, wherein low temperature stress means freezing of plants below +4° C. as well as chilling of plants below 15° C. and wherein high temperature stress means for example a temperature above 35° C. The range of stress and stress response depends on the different plants, which are used for the invention, i.e. it differs for example between a plant such as wheat and a plant such as Arabidopsis. A common response of plants to environmental stress is the loss of yield or the loss of quality. It is also to be understood that as used in the specification and in the claims, “a” or “an” can mean one or more, depending upon the context in which it is used. Thus, for example, reference to “a cell” can mean that at least one cell can be utilized.

[0188] As also used herein, the terms “nucleic acid” and “nucleic acid molecule” are intended to include DNA molecules (e.g., cDNA or genomic DNA) and RNA molecules (e.g., mRNA) and analogs of the DNA or RNA generated using nucleotide analogs. This term also encompasses untranslated sequence located at both the 3′ and 5′ ends of the coding region of the gene: at least about 1000 nucleotides of sequence upstream from the 5′ end of the coding region and at least about 200 nucleotides of sequence downstream from the 3′ end of the coding region of the gene. The nucleic acid molecule can be single stranded or double stranded, but preferably is double-stranded DNA.

[0189] An “isolated” nucleic acid molecule is one that is substantially separated from other nucleic acid molecules, which are present in the natural source of the nucleic acid. That means other nucleic acid molecules are present in an amount less than 5% based on weight of the amount of the desired nucleic acid, preferably less than 2% by weight, more preferably less than 1% by weight, and most preferably less than 0.5% by weight. Preferably, an “isolated” nucleic acid is free of some of the sequences that naturally flank the nucleic acid (i.e., sequences located at the 5′ and 3′ ends of the nucleic acid) in the genomic DNA of the organism, from which the nucleic acid is derived. For example, in various embodiments, the isolated stress related protein encoding nucleic acid molecule can contain less than about 5 kb, 4 kb, 3 kb, 2 kb, 1 kb, 0.5 kb, or 0.1 kb of nucleotide sequences, which naturally flank the nucleic acid molecule in genomic DNA of the cell from which the nucleic acid is derived. Moreover, an “isolated” nucleic acid molecule, such as a cDNA molecule, can be free from some of the other cellular material with which it is naturally associated, or culture medium when produced by recombinant techniques, or chemical precursors or other chemicals when chemically synthesized.

[0190] A nucleic acid molecule of the present invention, e.g., a nucleic acid molecule encoding an SRP or a portion thereof, which confers tolerance and/or resistance to environmental stress in plants, can be isolated using standard molecular biological techniques and the sequence information provided herein. For example, an Arabidopsis thaliana stress related protein-encoding cDNA can be isolated from a A. thaliana c-DNA library using all or portion of one of the sequences disclosed in the Sequence Listing. Moreover, a nucleic acid molecule encompassing all or a portion of one of the sequences disclosed in the Sequence Listing can be isolated by the polymerase chain reaction using oligonucleotide primers designed based upon this sequence. For example, mRNA can be isolated from plant cells (e.g., by the guanidinium-thiocyanate extraction procedure of Chirgwin et al., 1979 Biochemistry 18:5294-5299) and cDNA can be prepared using reverse transcriptase (e.g., Moloney MLV reverse transcriptase, available from Gibco/BRL, Bethesda, Md.; or AMV reverse transcriptase, available from Seikagaku America, Inc., St. Petersburg, Fla.). Synthetic oligonucleotide primers for polymerase chain reaction amplification can be designed based upon one of the nucleotide sequences disclosed in the Sequence Listing. A nucleic acid molecule of the invention can be amplified using cDNA or, alternatively, genomic DNA, as a template and appropriate oligonucleotide primers according to standard PCR amplification techniques. The nucleic acid molecule, so amplified, can be cloned into an appropriate vector and characterized by DNA sequence analysis. Furthermore, oligonucleotides corresponding to a SRP encoding nucleotide sequence can be prepared by standard synthetic techniques, e.g., using an automated DNA synthesizer.

[0191] In a preferred embodiment, an isolated nucleic acid molecule of the invention comprises one of the nucleotide sequences disclosed in the Sequence Listing encoding the SRP (i.e., the “coding region”), as well as 5′ untranslated sequences and 3′ untranslated sequences.

[0192] Moreover, the nucleic acid molecule of the invention can comprise only a portion of the coding region of one of the sequences disclosed in the Sequence Listing, for example, a fragment, which can be used as a probe or primer or a fragment encoding a biologically active portion of an SRP.

[0193] Portions of proteins encoded by the SRP encoding nucleic acid molecules of the invention are preferably biologically active portions described herein. As used herein, the term “biologically-active portion of” a SRP is intended to include a portion, e.g., a domain/motif, of stress related protein that participates in a stress tolerance and/or resistance response in a plant. To determine whether a SRP, or a biologically active portion thereof, results in increased stress tolerance in a plant, a stress analysis of a plant comprising the SRP may be performed. Such analysis methods are well known to those skilled in the art, as detailed in the Examples. More specifically, nucleic acid fragments encoding biologically active portions of a SRP can be prepared by isolating a portion of one of the sequences disclosed in the Sequence. Listing expressing the encoded portion of the SRP or peptide (e.g., by recombinant expression in vitro) and assessing the activity of the encoded portion of the SRP or peptide.

[0194] Biologically active portions of a SRP are encompassed by the present invention and include peptides comprising amino acid sequences derived from the amino acid sequence of a SRP encoding gene, or the amino acid sequence of a protein homologous to a SRP, which include fewer amino acids than a full length SRP or the full length protein, which is homologous to a SRP, and exhibits at least some enzymatic activity of a SRP. Typically, biologically active portions (e.g., peptides which are, for example, 5, 10, 15, 20, 30, 35, 36, 37, 38, 39, 40, 50, 100, or more amino acids in length) comprise a domain or motif with at least one activity of a SRP. Moreover, other biologically active portions in which other regions of the protein are deleted, can be prepared by recombinant techniques, and evaluated for one or more of the activities described herein. Preferably, the biologically active portions of a SRP include one or more selected domains/motifs or portions thereof having biological activity.

[0195] The term “biological active portion” or “biological activity” means a SRP or a portion of a SRP which still has at least 10% or 20%, preferably 20%, 30%, 40%, or 50%, especially preferably 60%, 70%, or 80% of the enzymatic activity of the natural or starting enzyme.

[0196] A nucleic acid molecule encompassing a complete sequence of the nucleic acid molecules used in the process, for example the polynucleotide of the invention, or a part thereof may additionally be isolated by polymerase chain reaction, oligonucleotide primers based on this sequence or on parts thereof being used. For example, a nucleic acid molecule comprising the complete sequence or part thereof can be isolated by polymerase chain reaction using oligonucleotide primers, which have been generated on the basis of this sequence. For example, mRNA can be isolated from cells (for example by means of the guanidinium thiocyanate extraction method of Chirgwin et al. (1979) Biochemistry 18:5294-5299) and cDNA can be generated by means of reverse transcriptase (for example Moloney MLV reverse transcriptase, available from Gibco/BRL, Bethesda, Md., or AMV reverse transcriptase, obtainable from Seikagaku America, Inc., St. Petersburg, Fla.).

[0197] Synthetic oligonucleotide primers for the amplification, e.g. as shown in Table 2, by means of polymerase chain reaction can be generated on the basis of a sequence disclosed in the Sequence Listing or the sequences derived from polypeptides as disclosed in the Sequence Listing.

[0198] Moreover, it is possible to identify conserved regions from various organisms by carrying out protein sequence alignments with the polypeptide used in the process of the invention, in particular with sequences of the polypeptide of the invention, from which conserved regions, and in turn, degenerate primers can be derived.

[0199] Degenerated primers can then be utilized by PCR for the amplification of fragments of novel proteins having above-mentioned activity, e.g. having an SPR activity or further functional homologs of the polypeptide of the invention from other organisms.

[0200] These fragments can then be utilized as hybridization probe for isolating the complete gene sequence. As an alternative, the missing 5′ and 3′ sequences can be isolated by means of RACE-PCR (rapid amplification of cDNA ends). A nucleic acid molecule according to the invention can be amplified using cDNA or, as an alternative, genomic DNA as template and suitable oligonucleotide primers, following standard PCR amplification techniques. The nucleic acid molecule amplified thus can be cloned into a suitable vector and characterized by means of DNA sequence analysis. Oligonucleotides, which correspond to one of the nucleic acid molecules used in the process can be generated by standard synthesis methods, for example using an automatic DNA synthesizer.

[0201] Nucleic acid molecules which are advantageously for the process according to the invention can be isolated based on their homology to the nucleic acid molecules disclosed herein using the sequences or part thereof as hybridization probe and following standard hybridization techniques under stringent hybridization conditions. In this context, it is possible to use, for example, isolated nucleic acid molecules of at least 15, 20, 25, 30, 35, 40, 50, 60, or more nucleotides, preferably of at least 15, 20, or 25 nucleotides in length, which hybridize under stringent conditions with the above-described nucleic acid molecules, in particular with those which encompass a nucleotide sequence of the present invention, a nucleic acid molecule used in the present invention or in a process of the invention, or encoding a protein used in the invention or of the nucleic acid molecule of the invention. Nucleic acid molecules with 30, 50, 100, 250, or more nucleotides may also be used.

[0202] In addition to fragments of the SRP described herein, the present invention includes homologs and analogs of naturally occurring SRP and SRP encoding nucleic acids in a plant.

[0203] “Homologs” are defined herein as two nucleic acids or proteins that have similar, or “homologous,” nucleotide or amino acid sequences, respectively. Homologs include allelic variants, orthologs, paralogs, agonists, and antagonists of SRP, as defined hereafter. The term “homolog” further encompasses nucleic acid molecules that differ from one of the nucleotide sequences disclosed in the Sequence Listing (and portions thereof) due to degeneracy of the genetic code and thus encode the same SRP as that encoded by the amino acid sequences disclosed in the Sequence Listing. As used herein a “naturally-occurring” SRP refers to a SRP amino acid sequence that occurs in nature.

[0204] The term “homology” means that the respective nucleic acid molecules or encoded proteins are functionally and/or structurally equivalent. The nucleic acid molecules that are homologous to the nucleic acid molecules described above and that are derivatives of said nucleic acid molecules are, for example, variations of said nucleic acid molecules which represent modifications having the same biological function, in particular encoding proteins with the same or substantially the same biological function. They may be naturally occurring variations, such as sequences from other plant varieties or species, or mutations. These mutations may occur naturally or may be obtained by mutagenesis techniques. The allelic variations may be naturally occurring allelic variants as well as synthetically produced or genetically engineered variants. Structural equivalents can, for example, be identified by testing the binding of said polypeptide to antibodies or computer-based predictions. Structurally equivalent has the similar immunological characteristic, e.g. comprise similar epitopes.

[0205] Functional equivalents derived from one of the polypeptides disclosed in the Sequence Listing according to the invention by substitution, insertion or deletion have at least 30%, 35%, 40%, 45%, or 50%, preferably at least 55%, 60%, 65%, or 70% by preference at least 80%, especially preferably at least 85% or 90%, 91%, 92%, 93%, or 94%, very especially preferably at least 95%, 97%, 98%, or 99% homology with one of the polypeptides disclosed in the Sequence Listing according to the invention and are distinguished by essentially the same properties as a polypeptide disclosed in the Sequence Listing.

[0206] Functional equivalents derived from a nucleic acid sequence disclosed in the Sequence Listing by substitution, insertion or deletion have at least 30%, 35%, 40%, 45%, or 50%, preferably at least 55%, 60%, 65%, or 70% by preference at least 80%, especially preferably at least 85% or 90%, 91%, 92%, 93%, or 94%, very especially preferably at least 95%, 97%, 98%, or 99% homology with one of the polypeptides disclosed in the Sequence Listing according to the invention and encode polypeptides having essentially the same properties as a polypeptide disclosed in the Sequence Listing.

[0207] “Essentially the same properties” of a functional equivalent is above all understood as meaning that the functional equivalent has above mentioned activity, e.g. conferring an increase in the fine chemical amount while increasing the amount of protein, activity or function of said functional equivalent in an organism, e.g., a microorganism, a plant, or plant or animal tissue, plant or animal cells, or a part of the same.

[0208] By “hybridizing” it is meant that such nucleic acid molecules hybridize under conventional hybridization conditions, preferably under stringent conditions such as described by, e.g., Sambrook (Molecular Cloning; A Laboratory Manual, 2nd Edition, Cold Spring Harbor Laboratory Press, Cold Spring Harbor, N.Y. (1989)) or in Current Protocols in Molecular Biology, John Wiley & Sons, N.Y. (1989), 6.3.1-6.3.6.

[0209] According to the invention, DNA as well as RNA molecules of the nucleic acid of the invention can be used as probes. Further, as template for the identification of functional homologues Northern blot assays as well as Southern blot assays can be performed. The Northern blot assay advantageously provides further information about the expressed gene product: e.g. expression pattern, occurrence of processing steps, like splicing and capping, etc. The Southern blot assay provides additional information about the chromosomal localization and or ganization of the gene encoding the nucleic acid molecule of the invention.

[0210] A preferred, nonlimiting example of stringent hybridization conditions are hybridizations in 6× sodium chloride/sodium citrate (=SSC) at approximately 45° C., followed by one or more wash steps in 0.2×SSC, 0.1% SDS at 50° C. to 65° C., for example at 50° C., 55° C., or 60° C. The skilled worker knows that these hybridization conditions differ as a function of the type of the nucleic acid and, for example when organic solvents are present, with regard to the temperature and concentration of the buffer. The temperature under “standard hybridization conditions” differs for example as a function of the type of the nucleic acid between 42° C. and 58° C., preferably between 45° C. and 50° C. in an aqueous buffer with a concentration of 0.1×0.5×, 1×, 2×, 3×, 4× or 5×SSC (pH 7.2). If organic solvent(s) is/are present in the abovementioned buffer, for example 50% formamide, the temperature under standard conditions is approximately 40° C., 42° C., or 45° C. The hybridization conditions for DNA:DNA hybrids are preferably for example 0.1×SSC and 20° C., 25° C., 30° C., 35° C., 40° C., or 45° C., preferably between 30° C. and 45° C. The hybridization conditions for DNA:RNA hybrids are preferably for example 0.1×SSC and 30° C., 35° C., 40° C., 45° C., 50° C. or 55° C., preferably between 45° C. and 55° C. The abovementioned hybridization temperatures are determined for example for a nucleic acid approximately 100 by (=base pairs) in length and a G+C content of 50% in the absence of formamide. The skilled worker knows to determine the hybridization conditions required with the aid of textbooks, for example the ones mentioned above, or from the following textbooks: Sambrook et al., “Molecular Cloning”, Cold Spring Harbor Laboratory, 1989; Hames and Higgins (Ed.) 1985, “Nucleic Acids Hybridization: A Practical Approach”, IRL Press at Oxford University Press, Oxford; Brown (Ed.) 1991, “Essential Molecular Biology: A Practical Approach,” IRL Press at Oxford University Press, Oxford.

[0211] A further example of one such stringent hybridization condition is hybridization at 4×SSC at 65° C., followed by a washing in 0.1×SSC at 65° C. for one hour. Alternatively, an exemplary stringent hybridization condition is in 50% formamide, 4×SSC at 42° C. Further, the conditions during the wash step can be selected from the range of conditions delimited by low-stringency conditions (approximately 2×SSC at 50° C.) and high-stringency conditions (approximately 0.2×SSC at 50° C., preferably at 65° C.) (20×SSC: 0.3M sodium citrate, 3M NaCl, pH 7.0). In addition, the temperature during the wash step can be raised from low-stringency conditions at room temperature, approximately 22° C., to higher-stringency conditions at approximately 65° C. Both of the parameters salt concentration and temperature can be varied simultaneously, or else one of the two parameters can be kept constant while only the other is varied. Denaturants, for example formamide or SDS, may also be employed during the hybridization. In the presence of 50% formamide, hybridization is preferably effected at 42° C. Relevant factors like i) length of treatment, ii) salt conditions, iii) detergent conditions, iv) competitor DNAs, v) temperature, and yl) probe selection can be combined case by case so that not all possibilities can be mentioned herein.

[0212] Thus, in a preferred embodiment, Northern blots are prehybridized with Rothi-Hybri-Quick buffer (Roth, Karlsruhe) at 68° C. for 2 h. Hybridization with radioactive labelled probe is done overnight at 68° C. Subsequent washing steps are performed at 68° C. with 1×SSC.

[0213] For Southern blot assays the membrane is prehybridized with Rothi-Hybri-Quick buffer (Roth, Karlsruhe) at 68° C. for 2 h. The hybridization with radioactive labelled probe is conducted over night at 68° C. Subsequently the hybridization buffer is discarded and the filter shortly washed using 2×SSC; 0.1% SDS. After discarding the washing buffer new 2×SSC; 0.1% SDS buffer is added and incubated at 68° C. for 15 minutes. This washing step is performed twice followed by an additional washing step using 1×SSC; 0.1% SDS at 68° C. for 10 min.

[0214] Some further examples of conditions for DNA hybridization (Southern blot assays) and wash step are shown hereinbelow:

[0215] Hybridization conditions can be selected, for example, from the following conditions: a) 4×SSC at 65° C.; b) 6×SSC at 45° C.; c) 6×SSC, 100 mg/ml denatured fragmented fish sperm DNA at 68° C.; d) 6×SSC, 0.5% SDS, 100 mg/ml denatured salmon sperm DNA at 68° C.; e) 6×SSC, 0.5% SDS, 100 mg/ml denatured fragmented salmon sperm DNA, 50% formamide at 42° C.; f) 50% formamide, 4×SSC at 42° C.; g) 50% (vol/vol) formamide, 0.1% bovine serum albumin, 0.1% Ficoll, 0.1% polyvinylpyrrolidone, 50 mM sodium phosphate buffer pH 6.5, 750 mM NaCl, 75 mM sodium citrate at 42° C.; h) 2× or 4×SSC at 50° C. (low-stringency condition; or i) 30 to 40% formamide, 2× or 4×SSC at 42° C. (low-stringency condition).

[0216] Wash steps can be selected, for example, from the following conditions: a) 0.015 M NaCl/0.0015 M sodium citrate/0.1% SDS at 50° C.; b) 0.1×SSC at 65° C.; c) 0.1×SSC, 0.5% SDS at 68° C.; d) 0.1×SSC, 0.5% SDS, 50% formamide at 42° C.; e) 0.2×SSC, 0.1% SDS at 42° C.; f) 2×SSC at 65° C. (low-stringency condition).

[0217] In an other embodiment is meant by standard conditions, for example, depending on the nucleic acid in question temperatures between 42° C. and 58° C. in an aqueous buffer solution having a concentration of between 0.1 and 5×SSC (1×SSC=0.15 M NaCl, 15 mM sodium citrate, pH 7.2) or additionally in the presence of 50% formamide, such as by way of example 42° C. in 5×SSC, 50% formamide. Hybridization conditions for DNA:DNA hybrids are advantageously 0.1×SSC and temperatures between approximately 20° C. and 45° C., preferably between approximately 30° C. and 45° C. For DNA:RNA hybrids the hybridization conditions are advantageously 0.1×SSC and temperatures between approximately 30° C. and 55° C., preferably between approximately 45° C. and 55° C. These specified temperatures for hybridization are melting temperature values calculated by way of example for a nucleic acid having a length of approximately 100 nucleotides and a G+C content of 50% in the absence of formamide. The experimental conditions for DNA hybridization are described in relevant genetics textbooks such as by way of example Sambrook et al., “Molecular Cloning,” Cold Spring Harbor Laboratory, 1989, and may be calculated by formulae known to those skilled in the art, for example as a function of the length of the nucleic acids, the nature of the hybrids or the G+C content. Those skilled in the art may draw on the following textbooks for further information on hybridization: Ausubel et al. (eds), 1985, Current Protocols in Molecular Biology, John Wiley & Sons, New York; Hames and Higgins (eds), 1985, Nucleic Acids Hybridization: A Practical Approach, IRL Press at Oxford University Press, Oxford; Brown (ed), 1991, Essential Molecular Biology: A Practical Approach, IRL Press at Oxford University Press, Oxford.

[0218] Polypeptides having above-mentioned activity, i.e. conferring the altered metabolic activity, derived from other organisms, can be encoded by other DNA sequences, which hybridize to the sequences disclosed in the Sequence Listing under relaxed hybridization conditions and which code on expression for peptides conferring an altered metabolic activity.

[0219] Further, some applications have to be performed at low stringency hybridization conditions, without any consequences for the specificity of the hybridization. For example, a Southern blot analysis of total DNA could be probed with a nucleic acid molecule of the present invention and washed at low stringency (55° C. in 2×SSPE0, 1% SDS). The hybridization analysis could reveal a simple pattern of only genes encoding polypeptides of the present invention or used in the process of the invention, e.g. having herein-mentioned activity of increasing the fine chemical. A further example of such low-stringent hybridization conditions is 4×SSC at 50° C. or hybridization with 30 to 40% formamide at 42° C. Such molecules comprise those which are fragments, analogues or derivatives of the polypeptide of the invention or used in the process of the invention and differ, for example, by way of amino acid and/or nucleotide deletion(s), insertion(s), substitution (s), addition(s) and/or recombination (s) or any other modification(s) known in the art either alone or in combination from the above-described amino acid sequences or their underlying nucleotide sequence(s). However, it is preferred to use high stringency hybridization conditions.

[0220] Hybridization should advantageously be carried out with fragments of at least 5, 10, 15, 20, 25, 30, 35, or 40 bp, advantageously at least 50, 60, 70, or 80 bp, preferably at least 90, 100, or 110 bp. Most preferably are fragments of at least 15, 20, 25, or 30 bp. Preferably are also hybridizations with at least 100 by or 200, very especially preferably at least 400 by in length. In an especially preferred embodiment, the hybridization should be carried out with the entire nucleic acid sequence with conditions described above.

[0221] The terms “fragment,” “fragment of a sequence,” or “part of a sequence” mean a truncated sequence of the original sequence referred to. The truncated sequence (nucleic acid or protein sequence) can vary widely in length; the minimum size being a sequence of sufficient size to provide a sequence with at least a comparable function and/or activity of the original sequence referred to or hybridizing with the nucleic acid molecule of the invention or used in the process of the invention under stringent conditions, while the maximum size is not critical. In some applications, the maximum size usually is not substantially greater than that required to provide the desired activity and/or function(s) of the original sequence.

[0222] In addition to fragments and fusion polypeptides of the SRPs described herein, the present invention includes homologs and analogs of naturally occurring SRPs and SRP encoding nucleic acids in a plant. “Homologs” are defined herein as two nucleic acids or polypeptides that have similar, or substantially identical, nucleotide or amino acid sequences, respectively. Homologs include allelic variants, orthologs, paralogs, agonists, and antagonists of SRPs as defined hereafter. The term “homolog” further encompasses nucleic acid molecules that differ from one of the nucleotide sequences disclosed in the Sequence Listing (and portions thereof) due to degeneracy of the genetic code and thus encode the same SRP as that encoded by the nucleotide sequences disclosed in the Sequence Listing. As used herein a “naturally occurring” SRP refers to a SRP amino acid sequence that occurs in nature. Preferably, a naturally occurring SRP comprises an amino acid sequence selected from the group consisting of polypeptides disclosed in the Sequence Listing.

[0223] An agonist of the SRP can retain substantially the same, or a subset, of the biological activities of the SRP. An antagonist of the SRP can inhibit one or more of the activities of the naturally occurring form of the SRP. For example, the SRP antagonist can competitively bind to a downstream or upstream member of the cell membrane component metabolic cascade that includes the SRP, or bind to a SRP that mediates transport of compounds across such membranes, thereby preventing translocation from taking place.

[0224] Nucleic acid molecules corresponding to natural allelic variants and analogs, orthologs and paralogs of a SRP cDNA can be isolated based on their identity to the Saccharomyces cerevisiae, E. coli, Brassica napus, Glycine max, or Oryza sativa SRP nucleic acids described herein using SRP cDNAs, or a portion thereof, as a hybridization probe according to standard hybridization techniques under stringent hybridization conditions. In an alternative embodiment, homologs of the SRP can be identified by screening combinatorial libraries of mutants, e.g., truncation mutants, of the SRP for SRP agonist or antagonist activity. In one embodiment, a variegated library of SRP variants is generated by combinatorial mutagenesis at the nucleic acid level and is encoded by a variegated gene library.

[0225] A variegated library of SRP variants can be produced by, for example, enzymatically ligating a mixture of synthetic oligonucleotides into gene sequences such that a degenerate set of potential SRP sequences is expressible as individual polypeptides, or alternatively, as a set of larger fusion polypeptides (e.g., for phage display) containing the set of SRP sequences therein. There are a variety of methods that can be used to produce libraries of potential SRP homologs from a degenerate oligonucleotide sequence. Chemical synthesis of a degenerate gene sequence can be performed in an automatic DNA synthesizer, and the synthetic gene is then ligated into an appropriate expression vector. Use of a degenerate set of genes allows for the provision, in one mixture, of all of the sequences encoding the desired set of potential SRP sequences. Methods for synthesizing degenerate oligonucleotides are known in the art. See, e.g., Narang, S. A., 1983, Tetrahedron 39:3; Itakura et al., 1984, Annu. Rev. Biochem. 53:323; Itakura et al., 1984, Science 198:1056; Ike et al., 1983, Nucleic Acid Res. 11:477.

[0226] In addition, libraries of fragments of the SRP coding regions can be used to generate a variegated population of SRP fragments for screening and subsequent selection of homologs of a SRP. In one embodiment, a library of coding sequence fragments can be generated by treating a double stranded PCR fragment of a SRP coding sequence with a nuclease under conditions wherein nicking occurs only about once per molecule, denaturing the double stranded DNA, renaturing the DNA to form double stranded DNA, which can include sense/antisense pairs from different nicked products, removing single stranded portions from reformed duplexes by treatment with S1 nuclease, and ligating the resulting fragment library into an expression vector. By this method, an expression library can be derived which encodes N-terminal, C-terminal, and internal fragments of various sizes of the SRP.

[0227] Several techniques are known in the art for screening gene products of combinatorial libraries made by point mutations or truncation, and for screening cDNA libraries for gene products having a selected property. Such techniques are adaptable for rapid screening of the gene libraries generated by the combinatorial mutagenesis of SRP homologs. The most widely used techniques, which are amenable to high through-put analysis, for screening large gene libraries typically include cloning the gene library into replicable expression vectors, transforming appropriate cells with the resulting library of vectors, and expressing the combinatorial genes under conditions in which detection of a desired activity facilitates isolation of the vector encoding the gene whose product was detected. Recursive ensemble mutagenesis (REM), a new technique that enhances the frequency of functional mutants in the libraries, can be used in combination with the screening assays to identify SRP homologs (Arkin and Yourvan, 1992, PNAS 89:7811-7815; Delgrave et al., 1993, Polypeptide Engineering 6(3):327-331). In another embodiment, cell based assays can be exploited to analyze a variegated SRP library, using methods well known in the art. The present invention further provides a method of identifying a novel SRP, comprising (a) raising a specific antibody response to a SRP, or a fragment thereof, as described herein; (b) screening putative SRP material with the antibody, wherein specific binding of the antibody to the material indicates the presence of a potentially novel SRP; and (c) analyzing the bound material in comparison to known SRP, to determine its novelty.

[0228] As stated above, the present invention includes SRPs and homologs thereof. To determine the percent sequence identity of two amino acid sequences. (e.g., one of the sequences disclosed in the Sequence Listing, and a mutant form thereof), the sequences are aligned for optimal comparison purposes (e.g., gaps can be introduced in the sequence of one polypeptide for optimal alignment with the other polypeptide or nucleic acid). The amino acid residues at corresponding amino acid positions are then compared. When a position in one sequence (e.g., one of the sequences disclosed in the Sequence Listing) is occupied by the same amino acid residue as the corresponding position in the other sequence (e.g., a mutant form of the sequence selected from a polypeptide disclosed in the Sequence Listing), then the molecules are identical at that position. The same type of comparison can be made between two nucleic acid sequences.

[0229] The percent sequence identity between the two sequences is a function of the number of identical positions shared by the sequences (i.e., percent sequence identity=numbers of identical positions/total numbers of positions×100). Preferably, the isolated amino acid homologs included in the present invention are at least about 50-60%, preferably at least about 60-70%, and more preferably at least about 70-75%, 75-80%, 80-85%, 85-90%, or 90-95%, and most preferably at least about 96%, 97%, 98%, 99%, or more identical to an entire amino acid sequence disclosed in the Sequence Listing. In yet another embodiment, the isolated amino acid homologs included in the present invention are at least about 50-60%, preferably at least about 60-70%, and more preferably at least about 70-75%, 75-80%, 80-85%, 85-90%, or 90-95%, and most preferably at least about 96%, 97%, 98%, 99%, or more identical to an entire amino acid sequence encoded by a nucleic acid sequence disclosed in the Sequence Listing. In other embodiments, the SRP amino acid homologs have sequence identity over at least 15 contiguous amino acid residues, more preferably at least 25 contiguous amino acid residues, and most preferably at least 35 contiguous amino acid residues of a sequence disclosed in the Sequence Listing.

[0230] In another preferred embodiment, an isolated nucleic acid homolog of the invention comprises a nucleotide sequence which is at least about 50-60%, preferably at least about 60-70%, more preferably at least about 70-75%, 75-80%, 80-85%, 85-90%, or 90-95%, and even more preferably at least about 95%, 96%, 97%, 98%, 99%, or more identical to a nucleotide sequence disclosed in the Sequence Listing, or to a portion comprising at least 20, 30, 40, 50, or 60 consecutive nucleotides thereof. The preferable length of sequence comparison for nucleic acids is at least 75 nucleotides, more preferably at least 100 nucleotides and most preferably the entire length of the coding region.

[0231] It is further preferred that the isolated nucleic acid homolog of the invention encodes a SRP, or portion thereof, that is at least 85% identical to an amino acid sequence disclosed in the Sequence Listing and that functions as a modulator of an environmental stress response in a plant. In a more preferred embodiment, overexpression of the nucleic acid homolog in a plant increases the tolerance of the plant to an environmental stress.

[0232] For the purposes of the invention, the percent sequence identity between two nucleic acid or polypeptide sequences is determined using the Vector NTI 6.0 (PC) software package (InforMax, 7600 Wisconsin Ave., Bethesda, Md. 20814). A gap-opening penalty of 15 and a gap extension penalty of 6.66 are used for determining the percent identity of two nucleic acids. A gap-opening penalty of 10 and a gap-extension penalty of 0.1 are used for determining the percent identity of two polypeptides. All other parameters are set at the default settings. For purposes of a multiple alignment (Clustal W algorithm), the gap-opening penalty is 10, and the gap-extension penalty is 0.05 with blosum62 matrix. It is to be understood that for the purposes of determining sequence identity when comparing a DNA sequence to an RNA sequence, a thymidine nucleotide is equivalent to a uracil nucleotide.

[0233] In another aspect, the invention provides an isolated nucleic acid comprising a polynucleotide that hybridizes to a polynucleotide disclosed in the Sequence Listing under stringent conditions. More particularly, an isolated nucleic acid molecule of the invention is at least 15 nucleotides in length and hybridizes under stringent conditions to the nucleic acid molecule comprising a nucleotide sequence disclosed in the Sequence Listing. In other embodiments, the nucleic acid is at least 30, 50, 100, 250, or more nucleotides in length. Preferably, an isolated nucleic acid homolog of the invention comprises a nucleotide sequence, which hybridizes under highly stringent conditions to a nucleotide sequence disclosed in the Sequence Listing, and functions as a modulator of stress tolerance in a plant. In a further preferred embodiment, overexpression of the isolated nucleic acid homolog in a plant increases a plant's tolerance to an environmental stress.

[0234] As used herein with regard to hybridization for DNA to DNA blot, the term “stringent conditions” refers in one embodiment to hybridization overnight at 60° C. in 10×Denharts solution, 6×SSC, 0.5% SDS and 100 μg/ml denatured salmon sperm DNA. Blots are washed sequentially at 62° C. for 30 minutes each time in 3×SSC/0.1% SDS, followed by 1×SSC/0.1% SDS and finally 0.1×SSC/0.1% SDS. As also used herein, “highly stringent conditions” refers to hybridization overnight at 65° C. in 10×Denharts solution, 6×SSC, 0.5% SDS and 100 μg/ml denatured salmon sperm DNA. Blots are washed sequentially at 65° C. for 30 minutes each time in 3×SSC/0.1% SDS, followed by 1×SSC/0.1% SDS and finally 0.1×SSC/0.1% SDS. Methods for nucleic acid hybridizations are described in Meinkoth and Wahl, 1984, Anal. Biochem. 138:267-284; Ausubel et al. eds, 1995, Current Protocols in Molecular Biology, Chapter 2, Greene Publishing and Wiley-Interscience, New York; and Tijssen, 1993, Laboratory Techniques in Biochemistry and Molecular Biology: Hybridization with Nucleic Acid Probes, Part I, Chapter 2, Elsevier, New York. Preferably, an isolated nucleic acid molecule of the invention that hybridizes under stringent or highly stringent conditions to a sequence disclosed in the Sequence Listing corresponds to a naturally occurring nucleic acid molecule. As used herein, a “naturally occurring” nucleic acid molecule refers to an RNA or DNA molecule having a nucleotide sequence that occurs in nature (e.g., encodes a natural polypeptide). In one embodiment, the nucleic acid encodes a naturally occurring Saccharomyces cerevisiae, E. coli, Brassica napus, Glycine max, or Oryza sativa SRP.

[0235] Using the above-described methods, and others known to those of skill in the art, one of ordinary skill in the art can isolate homologs of the SRPs comprising amino acid sequences disclosed in the Sequence Listing. One subset of these homologs are allelic variants. As used herein, the term “allelic variant” refers to a nucleotide sequence containing polymorphisms that lead to changes in the amino acid sequences of a SRP and that exist within a natural population (e.g., a plant species or variety). Such natural allelic variations can typically result in 1-5% variance in a SRP nucleic acid. Allelic variants can be identified by sequencing the nucleic acid sequence of interest in a number of different plants, which can be readily carried out by using hybridization probes to identify the same SRP genetic locus in those plants. Any and all such nucleic acid variations and resulting amino acid polymorphisms or variations in a SRP that are the result of natural allelic variation and that do not alter the functional activity of a SRP, are intended to be within the scope of the invention.

[0236] An isolated nucleic acid molecule encoding a SRP having sequence identity with a polypeptide sequence disclosed in the Sequence Listing can be created by introducing one or more nucleotide substitutions, additions or deletions into a nucleotide sequence disclosed in the Sequence Listing, respectively, such that one or more amino acid substitutions, additions, or deletions are introduced into the encoded polypeptide. Mutations can be introduced into one of the sequences disclosed in the Sequence Listing by standard techniques, such as site-directed mutagenesis and PCR-mediated mutagenesis. Preferably, conservative amino acid substitutions are made at one or more predicted non-essential amino acid residues. A “conservative amino acid substitution” is one in which the amino acid residue is replaced with an amino acid residue having a similar side chain.

[0237] Families of amino acid residues having similar side chains have been defined in the art. These families include amino acids with basic side chains (e.g., lysine, arginine, histidine), acidic side chains (e.g., aspartic acid, glutamic acid), uncharged polar side chains (e.g., glycine, asparagine, glutamine, serine, threonine, tyrosine, cysteine), nonpolar side chains (e.g., alanine, valine, leucine, isoleucine, proline, phenylalanine, methionine, tryptophan), beta-branched side chains (e.g., threonine, valine, isoleucine), and aromatic side chains (e.g., tyrosine, phenylalanine, tryptophan, histidine). Thus, a predicted nonessential amino acid residue in a SRP is preferably replaced with another amino acid residue from the same side chain family. Alternatively, in another embodiment, mutations can be introduced randomly along all or part of a SRP coding sequence, such as by saturation mutagenesis, and the resultant mutants can be screened for a SRP activity described herein to identify mutants that retain SRP activity. Following mutagenesis of one of the sequences disclosed in the Sequence Listing, the encoded polypeptide can be expressed recombinantly and the activity of the polypeptide can be determined by analyzing the stress tolerance of a plant expressing the polypeptide as described herein.

[0238] Additionally, optimized SRP nucleic acids can be created. As used herein, “optimized” refers to a nucleic acid that is genetically engineered to increase its expression in a given plant or animal. To provide plant optimized SRP nucleic acids, the DNA sequence of the gene can be modified to 1) comprise codons preferred by highly expressed plant genes; 2) comprise an A+T content in nucleotide base composition to that substantially found in plants; 3) form a plant initiation sequence; or 4) eliminate sequences that cause destabilization, inappropriate polyadenylation, degradation, and termination of RNA, or that form secondary structure hairpins or RNA splice sites. Increased expression of SRP nucleic acids in plants can be achieved by utilizing the distribution frequency of codon usage in plants in general or a particular plant. Methods for optimizing nucleic acid expression in plants can be found in EPA 0359472; EPA 0385962; PCT Application No. WO 91/16432; U.S. Pat. No. 5,380,831; U.S. Pat. No. 5,436,391; Perlack et al., 1991, Proc. Natl. Acad. Sci. USA 88:3324-3328; and Murray et al., 1989, Nucleic Acids Res. 17:477-498.

[0239] As used herein, “frequency of preferred codon usage” refers to the preference exhibited by a specific host cell in usage of nucleotide codons to specify a given amino acid. To determine the frequency of usage of a particular codon in a gene, the number of occurrences of that codon in the gene is divided by the total number of occurrences of all codons specifying the same amino acid in the gene. Similarly, the frequency of preferred codon usage exhibited by a host cell can be calculated by averaging frequency of preferred codon usage in a large number of genes expressed by the host cell. It is preferable that this analysis be limited to genes that are highly expressed by the host cell. The percent deviation of the frequency of preferred codon usage for a synthetic gene from that employed by a host cell is calculated first by determining the percent deviation of the frequency of usage of a single codon from that of the host cell followed by obtaining the average deviation over all codons. As defined herein, this calculation includes unique codons (i.e., ATG and TGG). In general terms, the overall average deviation of the codon usage of an optimized gene from that of a host cell is calculated using the equation 1A=n=1 Z Xₙ−YₙXₙ times 100 Z where Xₙ=frequency of usage for codon n in the host cell; Yₙ=frequency of usage for codon n in the synthetic gene; n represents an individual codon that specifies an amino acid; and the total number of codons is Z. The overall deviation of the frequency of codon usage, A, for all amino acids should preferably be less than about 25%, and more preferably less than about 10%.

[0240] Hence, a SRP nucleic acid can be optimized such that its distribution frequency of codon usage deviates, preferably, no more than 25% from that of highly expressed plant genes and, more preferably, no more than about 10%. In addition, consideration is given to the percentage G+C content of the degenerate third base (monocotyledons appear to favor G+C in this position, whereas dicotyledons do not). It is also recognized that the XCG (where X is A, T, C, or G) nucleotide is the least preferred codon in dicots whereas the XTA codon is avoided in both monocots and dicots. Optimized SRP nucleic acids of this invention also preferably have CG and TA doublet avoidance indices closely approximating those of the chosen host plant (i.e., Brassica napus, Glycine max, or Oryza sativa). More preferably these indices deviate from that of the host by no more than about 10-15%.

[0241] In addition to the nucleic acid molecules encoding the SRPs described above, another aspect of the invention pertains to isolated nucleic acid molecules that are antisense thereto. Antisense polynucleotides are thought to inhibit gene expression of a target polynucleotide by specifically binding the target polynucleotide and interfering with transcription, splicing, transport, translation, and/or stability of the target polynucleotide. Methods are described in the prior art for targeting the antisense polynucleotide to the chromosomal DNA, to a primary RNA transcript, or to a processed mRNA. Preferably, the target regions include splice sites, translation initiation codons, translation termination codons, and other sequences within the open reading frame.

[0242] The term “antisense,” for the purposes of the invention, refers to a nucleic acid comprising a polynucleotide that is sufficiently complementary to all or a portion of a gene, primary transcript, or processed mRNA, so as to interfere with expression of the endogenous gene. “Complementary” polynucleotides are those that are capable of base pairing according to the standard Watson-Crick complementarily rules. Specifically, purines will base pair with pyrimidines to form a combination of guanine paired with cytosine (G:C) and adenine paired with either thymine (A:T) in the case of DNA, or adenine paired with uracil (A:U) in the case of RNA. It is understood that two polynucleotides may hybridize to each other even if they are not completely complementary to each other, provided that each has at least one region that is substantially complementary to the other. The term “antisense nucleic acid” includes single stranded RNA as well as double-stranded DNA expression cassettes that can be transcribed to produce an antisense RNA. “Active” antisense nucleic acids are antisense RNA molecules that are capable of selectively hybridizing with a primary transcript or mRNA encoding a polypeptide having at least 80% sequence identity with a polypeptide disclosed in the Sequence Listing.

[0243] The antisense nucleic acid can be complementary to an entire SRP coding strand, or to only a portion thereof. In one embodiment, an antisense nucleic acid molecule is antisense to a “coding region” of the coding strand of a nucleotide sequence encoding a SRP. The term “coding region” refers to the region of the nucleotide sequence comprising codons that are translated into amino acid residues. In another embodiment, the antisense nucleic acid molecule is antisense to a “noncoding region” of the coding strand of a nucleotide sequence encoding a SRP. The term “noncoding region” refers to 5′ and 3′ sequences that flank the coding region that are not translated into amino acids (i.e., also referred to as 5′ and 3′ untranslated regions). The antisense nucleic acid molecule can be complementary to the entire coding region of SRP mRNA, but more preferably is an oligonucleotide, which is antisense to only a portion of the coding or noncoding region of SRP mRNA. For example, the antisense oligonucleotide can be complementary to the region surrounding the translation start site of PKSRP mRNA. An antisense oligonucleotide can be, for example, about 5, 10, 15, 20, 25, 30, 35, 40, 45, or 50 nucleotides in length. Typically, the antisense molecules of the present invention comprise an RNA having 60-100% sequence identity with at least 14 consecutive nucleotides of one of a nucleic acid disclosed in the Sequence Listing. Preferably, the sequence identity will be at least 70%, more preferably at least 75%, 80%, 85%, 90%, 95%, 98%, and most preferably 99%.

[0244] An antisense nucleic acid of the invention can be constructed using chemical synthesis and enzymatic ligation reactions using procedures known in the art. For example, an antisense nucleic acid (e.g., an antisense oligonucleotide) can be chemically synthesized using naturally occurring nucleotides or variously modified nucleotides designed to increase the biological stability of the molecules or to increase the physical stability of the duplex formed between the antisense and sense nucleic acids, e.g., phosphorothioate derivatives and acridine substituted nucleotides can be used. Examples of modified nucleotides which can be used to generate the antisense nucleic acid include 5-fluorouracil, 5-bromouracil, 5-chlorouracil, 5-iodouracil, hypoxanthine, xanthine, 4-acetylcytosine, 5-(carboxyhydroxylmethyl)uracil, 5-carboxymethylaminomethyl-2-thiouridine, 5-carboxymethylaminomethyluracil, dihydrouracil, beta-D-galactosylqueosine, inosine, N6-isopentenyladenine, 1-methylguanine, 1-methylinosine, 2,2-dimethylguanine, 2-methyladenine, 2-methylguanine, 3-methylcytosine, 5-methylcytosine, N6-adenine, 7-methylguanine, 5-methylaminomethyluracil, 5-methoxyaminomethyl-2-thiouracil, beta-D-mannosylqueosine, 5′-methoxycarboxymethyluracil, 5-methoxyuracil, 2-methylthio-N-6-isopentenyladenine, uracil-5-oxyacetic acid (v), wybutoxosine, pseudouracil, queosine, 2-thiocytosine, 5-methyl-2-thiouracil, 2-thiouracil, 4-thiouracil, 5-methyluracil, uracil-5-oxyacetic acid methylester, uracil-5-oxyacetic acid (v), 5-methyl-2-thiouracil, 3-(3-amino-3-N2-carboxypropyl)uracil, (acp3)w, and 2,6-diaminopurine. Alternatively, the antisense nucleic acid can be produced biologically using an expression vector into which a nucleic acid has been subcloned in an antisense orientation (i.e., RNA transcribed from the inserted nucleic acid will be of an antisense orientation to a target nucleic acid of interest, described further in the following subsection).

[0245] In yet another embodiment, the antisense nucleic acid molecule of the invention is an α-anomeric nucleic acid molecule. An α-anomeric nucleic acid molecule forms specific double-stranded hybrids with complementary RNA in which, contrary to the usual β-units, the strands run parallel to each other (Gaultier et al., 1987, Nucleic Acids. Res. 15:6625-6641). The antisense nucleic acid molecule can also comprise a 2′-o-methylribonucleotide (Inoue et al., 1987, Nucleic Acids Res. 15:6131-6148) or a chimeric RNA-DNA analogue (Inoue et al., 1987, FEBS Lett. 215:327-330).

[0246] The antisense nucleic acid molecules of the invention are typically administered to a cell or generated in situ such that they hybridize with or bind to cellular mRNA and/or genomic DNA encoding a SRP to thereby inhibit expression of the polypeptide, e.g., by inhibiting transcription and/or translation. The hybridization can be by conventional nucleotide complementarily to form a stable duplex, or, for example, in the case of an antisense nucleic acid molecule which binds to DNA duplexes, through specific interactions in the major groove of the double helix. The antisense molecule can be modified such that it specifically binds to a receptor or an antigen expressed on a selected cell surface, e.g., by linking the antisense nucleic acid molecule to a peptide or an antibody which binds to a cell surface receptor or antigen. The antisense nucleic acid molecule can also be delivered to cells using the vectors described herein. To achieve sufficient intracellular concentrations of the antisense molecules, vector constructs in which the antisense nucleic acid molecule is placed under the control of a strong prokaryotic, viral, or eukaryotic (including plant) promoter are preferred.

[0247] As an alternative to antisense polynucleotides, ribozymes, sense polynucleotides, or double stranded RNA (dsRNA) can be used to reduce expression of a SRP polypeptide. By “ribozyme” is meant a catalytic RNA-based enzyme with ribonuclease activity, which is capable of cleaving a single-stranded nucleic acid, such as an mRNA, to which it has a complementary region. Ribozymes (e.g., hammerhead ribozymes described in Haselhoff and Gerlach, 1988, Nature 334:585-591) can be used to catalytically cleave SRP mRNA transcripts to thereby inhibit translation of SRP mRNA. A ribozyme having specificity for a SRP-encoding nucleic acid can be designed based upon the nucleotide sequence of a SRP cDNA, as disclosed herein (i.e., disclosed in the Sequence Listing or otherwise in the specification) or on the basis of a heterologous sequence to be isolated according to methods taught in this invention. For example, a derivative of a Tetrahymena L-19 IVS RNA can be constructed in which the nucleotide sequence of the active site is complementary to the nucleotide sequence to be cleaved in a SRP-encoding mRNA. See, e.g., U.S. Pat. Nos. 4,987,071 and 5,116,742 to Cech et al. Alternatively, SRP mRNA can be used to select a catalytic RNA having a specific ribonuclease activity from a pool of RNA molecules. See, e.g., Bartel, D. and Szostak, J. W., 1993, Science 261:1411-1418. In preferred embodiments, the ribozyme will contain a portion having at least 7, 8, 9, 10, 12, 14, 16, 18 or 20 nucleotides, and more preferably 7 or 8 nucleotides, that have 100% complementarity to a portion of the target RNA. Methods for making ribozymes are known to those skilled in the art. See, e.g., U.S. Pat. Nos. 6,025,167; 5,773,260; and 5,496,698.

[0248] The term “dsRNA,” as used herein, refers to RNA hybrids comprising two strands of RNA. The dsRNAs can be linear or circular in structure. In a preferred embodiment, dsRNA is specific for a polynucleotide encoding either a polypeptide disclosed in the Sequence Listing or a polypeptide having at least 70% sequence identity with a polypeptide disclosed in the Sequence Listing. The hybridizing RNAs may be substantially or completely complementary. By “substantially complementary,” is meant that when the two hybridizing RNAs are optimally aligned using the BLAST program as described above, the hybridizing portions are at least 95% complementary: Preferably, the dsRNA will be at least 100 base pairs in length. Typically, the hybridizing RNAs will be of identical length with no over hanging 5′ or 3′ ends and no gaps. However, dsRNAs having 5′ or 3′ overhangs of up to 100 nucleotides may be used in the methods of the invention.

[0249] The dsRNA may comprise ribonucleotides or ribonucleotide analogs, such as 2′-O-methyl ribosyl residues, or combinations thereof. See, e.g., U.S. Pat. Nos. 4,130,641 and 4,024,222. A dsRNA polyriboinosinic acid:polyribocytidylic acid is described in U.S. Pat. No. 4,283,393. Methods for making and using dsRNA are known in the art. One method comprises the simultaneous transcription of two complementary DNA strands, either in vivo, or in a single in vitro reaction mixture. See, e.g., U.S. Pat. No. 5,795,715. In one embodiment, dsRNA can be introduced into a plant or plant cell directly by standard transformation procedures. Alternatively, dsRNA can be expressed in a plant cell by transcribing two complementary RNAs.

[0250] Other methods for the inhibition of endogenous gene expression, such as triple helix formation (Moser et al., 1987, Science 238:645-650 and Cooney et al., 1988, Science 241:456-459) and cosuppression (Napoli et al., 1990, The Plant Cell 2:279-289) are known in the art. Partial and full-length cDNAs have been used for the cosuppression of endogenous plant genes. See, e.g., U.S. Pat. Nos. 4,801,340, 5,034,323, 5,231,020, and 5,283,184; Van der Kroll et al., 1990, The Plant Cell 2:291-299; Smith et al., 1990, Mol. Gen. Genetics 224:477-481 and Napoli et al., 1990, The Plant Cell 2:279-289.

[0251] For sense suppression, it is believed that introduction of a sense polynucleotide blocks transcription of the corresponding target gene. The sense polynucleotide will have at least 65% sequence identity with the target plant gene or RNA. Preferably, the percent identity is at least 80%, 90%, 95%, or more. The introduced sense polynucleotide need not be full length relative to the target gene or transcript. Preferably, the sense polynucleotide will have at least 65% sequence identity with at least 100 consecutive nucleotides of one of the nucleic acids disclosed in the Sequence Listing. The regions of identity can comprise introns and and/or exons and untranslated regions. The introduced sense polynucleotide may be present in the plant cell transiently, or may be stably integrated into a plant chromosome or extrachromosomal replicon.

[0252] Moreover, nucleic acid molecules encoding SRP from the same or other species such as SRP analogs, orthologs, and paralogs, are intended to be within the scope of the present invention. As used herein, the term “analogs” refers to two nucleic acids that have the same or similar function, but that have evolved separately in unrelated organisms. As used herein, the term “orthologs” refers to two nucleic acids from different species that have evolved from a common ancestral gene by speciation. Normally, orthologs encode proteins having the same or similar functions. As also used herein, the term “paralogs” refers to two nucleic acids that are related by duplication within a genome. Paralogs usually have different functions, but these functions may be related (Tatusov, R. L. et al. 1997 Science 278(5338):631-637). Analogs, orthologs, and paralogs of a naturally occurring stress related protein can differ from the naturally occurring stress related protein by post-translational modifications, by amino acid sequence differences, or by both. Post-translational modifications include in vivo and in vitro chemical derivatization of polypeptides e.g., acetylation, carboxylation, phosphorylation or glycosylation, and such modifications may occur during polypeptide synthesis or processing or following treatment with isolated modifying enzymes. In particular, orthologs of the invention will generally exhibit at least 80-85%, more preferably 90%, 91%, 92%, 93%, 94%, and most preferably 95%, 96%, 97%, 98%, or even 99% identity or homology with all or part of a naturally occurring stress related protein amino acid sequence and will exhibit a function similar to a stress related protein. Orthologs of the present invention are also preferably capable of participating in the stress response in plants.

[0253] In addition to naturally-occurring variants of a stress related protein sequence that may exist in the population, the skilled artisan will further appreciate that changes can be introduced by mutation into a nucleotide sequence disclosed in the Sequence Listing, thereby leading to changes in the amino acid sequence of the encoded stress related protein, without altering the functional ability of the stress related protein or enhancing the functional ability of the stress related protein. For example, nucleotide substitutions leading to amino acid substitutions at “non-essential” amino acid residues can be made in a sequence disclosed in the Sequence Listing. A “non-essential” amino acid residue is a residue that can be altered from the wild-type sequence of one of stress related proteins without altering the activity thereof, whereas an “essential” amino acid residue is required for stress related protein activity. Other amino acid residues, however, (e.g., those that are not conserved or only semi-conserved in the domain having SRP activity) may not be essential for activity and thus are likely to be amenable to alteration without altering SRP activity.

[0254] Accordingly, another aspect of the invention pertains to nucleic acid molecules encoding stress related proteins that contain changes in amino acid residues that are not essential for stress related protein activity. Such SRP differ in amino acid sequence from a sequence disclosed in the Sequence Listing, yet retain at least one of the stress related protein activities described herein. In one embodiment, the isolated nucleic acid molecule comprises a nucleotide sequence encoding a protein, wherein the protein comprises an amino acid sequence at least about 50% homologous to an amino acid sequence disclosed in the Sequence Listing. Preferably, the protein encoded by the nucleic acid molecule is at least about 50-60% homologous to one of the sequences disclosed in the Sequence Listing, more preferably at least about 60-70% homologous to one of the sequences disclosed in the Sequence Listing, even more preferably at least about 70-80%, 80-90%, more preferably 90%, 91%, 92%, 93%, or 94% homologous to one of the sequences disclosed in the Sequence Listing and most preferably at least about 96%, 97%, 98%, or 99% homologous to one of the sequences disclosed in the Sequence Listing. The preferred stress related protein homologs of the present invention are preferably capable of participating in the stress tolerance response in a plant. The homology (=identity) was calculated over the entire amino acid range. The program used was PileUp (J. Mol. Evolution, 25 (1987), 351-360, Higgins et al., CABIOS, 5 1989: 151-153).

[0255] Homologs of the sequences disclosed in the Sequence Listing are furthermore to be understood as meaning, for example, homologs, analogs, orthologs and paralogs which have at least 30% homology (=identity) at the derived amino acid level, preferably at least 50%, 60%, 70%, or 80% homology, especially preferably at least 85% homology, very especially preferably 90% 91%, 92%, 93%, 94% homology, most preferably 95%, 96%, 97%, 98% or 99% homology. The homology (=identity) was calculated over the entire amino acid range. The program used was PileUp (J. Mol. Evolution, 25 (1987), 351-360, Higgens et al., CABIOS, 5 1989: 151-153) or the program Gap and BestFit (Needleman and Wunsch (J. Mol. Biol. 48; 443-453 (1970) and Smith and Waterman respectively (Adv. Appl. Math. 2; 482-489 (1981)), which are part of the GCG software package (Genetics Computer. Group, 575 Science Drive, Madison, Wis., USA 53711 (1991)). The above mentioned percentages of sequence homology are calculated with the program BestFit or Gap, preferably Gap, over the total sequence length with the following parameters used: Gap Weight: 8, Length Weight: 2.

[0256] Variants shall also be encompassed, in particular, functional variants, which can be obtained from a sequence disclosed in the Sequence Listing by means of deletion, insertion or substitution of nucleotides, the enzymatic activity of the derived synthetic proteins being retained or enhanced.

[0257] An isolated nucleic acid molecule encoding a stress related protein homologous to a protein sequence disclosed in the Sequence Listing can be created by introducing one or more nucleotide substitutions, additions or deletions into a nucleotide sequence disclosed in the Sequence Listing such that one or more amino acid substitutions, additions or deletions are introduced into the encoded protein. Mutations can be introduced into one of the sequences disclosed in the Sequence Listing by standard techniques, such as site-directed mutagenesis and PCR-mediated mutagenesis. Another route to the mutagenesis of enzymes, disclosed in the European Publication EP-A-0 909 821, is a method using the specific Escherichia coli strain XL1-Red to generate mutants and altered the enzyme activity.

[0258] Preferably, conservative amino acid substitutions are made at one or more predicted non-essential amino acid residues. A “conservative amino acid substitution” is one in which the amino acid residue is replaced with an amino acid residue having a similar side chain.

[0259] Families of amino acid residues having similar side chains have been defined in the art. These families include amino acids with basic side chains (e.g., lysine, arginine, histidine), acidic side chains (e.g., aspartic acid, glutamic acid), uncharged polar side chains (e.g., glycine, asparagine, glutamine, serine, threonine, tyrosine, cysteine), nonpolar side chains (e.g., alanine, valine, leucine, isoleucine, proline, phenylalanine, methionine, tryptophan), beta-branched side chains (e.g., threonine, valine, isoleucine) and aromatic side chains (e.g., tyrosine, phenylalanine, tryptophan, histidine). Thus, a predicted nonessential amino acid residue in a stress related protein is preferably replaced with another amino acid residue from the same side chain family. Alternatively, in another embodiment, mutations can be introduced randomly along all or part of a stress related protein coding sequence, such as by saturation mutagenesis, and the resultant mutants can be screened for a stress related protein activity as described herein to identify mutants that retain stress related protein activity or show enhanced stress related protein activity. Following mutagenesis of one of the sequences of a nucleic acid disclosed in the Sequence Listing, the encoded protein can be expressed recombinantly and the activity of the protein can be determined by analyzing the stress tolerance of a plant expressing the protein as described in the examples below.

[0260] A useful method to ascertain the level of transcription of the gene (an indicator of the amount of mRNA available for translation to the gene product) is to perform a Northern blot (for reference see, for example, Ausubel et al., 1988 Current Protocols in Molecular Biology, Wiley: New York). This information at least partially demonstrates the degree of transcription of the gene. Total cellular RNA can be prepared from cells, tissues or organs by several methods, all well-known in the art, such as that described in Bormann, E. R. et al., 1992 Mol. Microbiol. 6:317-326. To assess the presence or relative quantity of protein translated from this mRNA, standard techniques, such as a Western blot, may be employed. These techniques are well known to one of ordinary skill in the art (see, for example, Ausubel et al., 1988 Current Protocols in Molecular Biology, Wiley: New York).

[0261] The present invention also relates to a plant expression cassette comprising a SRP coding nucleic acid selected from the group comprising sequences disclosed in the Sequence Listing and/or homologs or parts thereof operatively linked to regulatory sequences and/or targeting sequences.

[0262] Further, object of the invention is an expression vector comprising a SRP encoding nucleic acid selected from the group comprising sequences of the nucleic acids disclosed in the Sequence Listing and/or homologs or parts thereof or a plant expression cassette as described above, whereby expression of the SRP coding nucleic acid in a host cell results in increased tolerance to environmental stress, which is preferably achieved by altering metabolic activity, as compared to a corresponding non-transformed, wild-type host cell.

[0263] The invention further provides an isolated recombinant expression vector comprising a stress related protein encoding nucleic acid as described above, wherein expression of the vector or stress related protein encoding nucleic acid, respectively in a host cell results in increased tolerance and/or resistance to environmental stress, which is preferably achieved by altering metabolic activity, as compared to the corresponding non-transformed, wild-type of the host cell. As used herein, the term “vector” refers to a nucleic acid molecule capable of transporting another nucleic acid to which it has been linked. One type of vector is a “plasmid,” which refers to a circular double stranded DNA loop into which additional DNA segments can be ligated. Another type of vector is a viral vector, wherein additional DNA segments can be ligated into the viral genome. Further types of vectors can be linearized nucleic acid sequences, such as transposons, which are pieces of DNA, which can copy and insert themselves. There have been 2 types of transposons found: simple transposons, known as Insertion Sequences and composite transposons, which can have several genes as well as the genes that are required for transposition.

[0264] Certain vectors are capable of autonomous replication in a host cell, into which they are introduced (e.g., bacterial vectors having a bacterial origin of replication and episomal mammalian vectors). Other vectors (e.g., non-episomal mammalian vectors) are integrated into the genome of a host cell upon introduction into the host cell, and thereby are replicated along with the host genome. Moreover, certain vectors are capable of directing the expression of genes to which they are operatively linked. Such vectors are referred to herein as “expression vectors.”In general, expression vectors of utility in recombinant DNA techniques are often in the form of plasmids. In the present specification, “plasmid” and “vector” can be used interchangeably as the plasmid is the most commonly used form of vector. However, the invention is intended to include such other forms of expression vectors, such as viral vectors (e.g., replication defective retroviruses, adenoviruses and adeno-associated viruses), which serve equivalent functions.

[0265] A plant expression cassette preferably contains regulatory sequences capable of driving gene expression in plant cells and operably linked so that each sequence can fulfill its function, for example, termination of transcription by polyadenylation signals. Preferred polyadenylation signals are those originating from Agrobacterium tumefaciens T-DNA such as the gene 3 known as octopine synthase of the Ti-plasmid pTiACH5 (Gielen et al., 1984 EMBO J. 3:835) or functional equivalents thereof but also all other terminators functionally active in plants are suitable.

[0266] As plant gene expression is very often not limited on transcriptional levels, a plant expression cassette preferably contains other operably linked sequences like translational enhancers such as the overdrive-sequence containing the 5′-untranslated leader sequence from tobacco mosaic virus enhancing the protein per RNA ratio (Gallie et al., 1987 Nucl. Acids Research 15:8693-8711).

[0267] Plant gene expression has to be operably linked to an appropriate promoter conferring gene expression in a timely, cell or tissue specific manner. Preferred are promoters driving constitutive expression (Benfey et al., 1989 EMBO J. 8:2195-2202) like those derived from plant viruses like the 35S CaMV (Franck et al., 1980 Cell 21:285-294), the 19S CaMV (see also U.S. Pat. No. 5,352,605 and PCT Application No. WO 8402913) or plant promoters like those from Rubisco small subunit described in U.S. Pat. No. 4,962,028.

[0268] Additional advantageous regulatory sequences are, for example, included in the plant promoters such as CaMV/35S [Franck et al., Cell 21 (1980) 285-294], PRP1 (Ward et al., Plant. Mol. Biol. 22 (1993)), SSU, OCS, lib4, usp, STLS1, B33, LEB4, nos or in the ubiquitin, napin or phaseolin promoter. Also advantageous in this connection are inducible promoters such as the promoters described in EP-A-0 388 186 (benzyl sulfonamide inducible), Plant J. 2, 1992: 397-404 (Gatz et al., Tetracyclin inducible), EP-A-0 335 528 (abscisic acid inducible) or WO 93/21334 (ethanol or cyclohexenol inducible). Additional useful plant promoters are the cytosolic FBPase promoter or ST-LSI promoter of the potato (Stockhaus et al., EMBO J. 8, 1989, 2445), the phosphorybosyl phyrophoshate amido transferase promoter of Glycine max (gene bank accession No. U87999) or the noden specific promoter described in EP-A-0 249 676. Additional particularly advantageous promoters are seed specific promoters which can be used for monokotyledones or dikotyledones and are described in U.S. Pat. No. 5,608,152 (napin promoter from rapeseed), WO 98/45461 (phaseolin promoter from Arabidopsis), U.S. Pat. No. 5,504,200 (phaseolin promoter from Phaseolus vulgaris), WO 91/13980 (Bce4 promoter from Brassica) and Baeumlein et al., Plant J., 2, 2, 1992: 233-239 (LEB4 promoter from leguminosa). Said promoters are useful in dikotyledones. The following promoters are useful for example in monokotyledones Ipt-2- or Ipt-1-promoter from barley (WO 95/15389 and WO 95/23230) or hordein promoter from barley. Other useful promoters are described in WO 99/16890.

[0269] It is possible in principle to use all natural promoters with their regulatory sequences like those mentioned above for the novel process. It is also possible and advantageous in addition to use synthetic promoters.

[0270] The gene construct may also comprise further genes, which are to be inserted into the organisms, and which are for example involved in stress resistance. It is possible and advantageous to insert and express in host organisms regulatory genes such as genes for inducers, repressors or enzymes, which intervene by their enzymatic activity in the regulation, or one or more or all genes of a biosynthetic pathway. These genes can be heterologous or homologous in origin. The inserted genes may have their own promoter or else be under the control of same promoter as a sequence disclosed in the Sequence Listing or their homologs.

[0271] The gene construct advantageously comprises, for expression of the other genes present, additionally 3′ and/or 5′ terminal regulatory sequences to enhance expression, which are selected for optimal expression depending on the selected host organism and gene or genes.

[0272] These regulatory sequences are intended to make specific expression of the genes and protein expression possible as mentioned above. This may mean, depending on the host organism, for example that the gene is expressed or overexpressed only after induction, or that it is immediately expressed and/or overexpressed.

[0273] The regulatory sequences or factors may moreover preferably have a beneficial effect on expression of the introduced genes, and thus increase it. It is possible in this way for the regulatory elements to be enhanced advantageously at the transcription level by using strong transcription signals such as promoters and/or enhancers. However, in addition, it is also possible to enhance translation by, for example, improving the stability of the mRNA.

[0274] Other preferred sequences for use in plant gene expression cassettes are targeting-sequences necessary to direct the gene product in its appropriate cell compartment (for review see Kermode, 1996 Crit. Rev. Plant Sci. 15(4):285-423 and references cited therein) such as the vacuole, the nucleus, all types of plastids like amyloplasts, chloroplasts, chromoplasts, the extracellular space, mitochondria, the endoplasmic reticulum, oil bodies, peroxisomes and other compartments of plant cells.

[0275] Plant gene expression can also be facilitated via an inducible promoter (for review, see Gatz, 1997 Annu. Rev. Plant Physiol. Plant Mol. Biol. 48:89-108). Chemically inducible promoters are especially suitable if gene expression is wanted to occur in a time specific manner.

[0276] Table 1 lists several examples of promoters that may be used to regulate transcription of the stress related protein nucleic acid coding sequences.

TABLE 1
Examples of Tissue-specific and Stress inducible promoters in plants.

| Expression | Reference |
|---|---|
| Cor78 - Cold, drought, | Ishitani, et al., Plant Cell 9: 1935-1949 (1997). |
| salt, ABA, wounding- | Yamaguchi-Shinozaki and Shinozaki, Plant Cell 6: 251-264 |
| inducible | (1994). |
| Rci2A - Cold, dehydration- | Capel et al., Plant Physiol 115: 569-576 (1997) |
| inducible | |
| Rd22-Drought, salt | Yamaguchi-Shinozaki and Shinozaki, Mol Gen Genet |
| | 238: 17-25 (1993). |
| Cor15A - Cold, dehydration, | Baker et al., Plant Mol. Biol. 24: 701-713 (1994). |
| ABA | |
| GH3-Auxin inducible | Liu et al., Plant Cell 6: 645-657 (1994) |
| ARSK1-Root, salt inducible | Hwang and Goodman, Plant J 8: 37-43 (1995). |
| PtxA - Root, salt inducible | GenBank accession X67427 |
| SbHRGP3 - Root specific | Ahn et al., Plant Cell 8: 1477-1490 (1998). |
| KST1 - Guard cell specific | Plesch et al., Plant Journal. 28(4): 455-64, (2001) |
| KAT1 - Guard cell specific | Plesch et al., Gene 249: 83-89 (2000) |
| | Nakamura et al., Plant Physiol. 109: 371-374 (1995) |
| salicylic acid inducible | PCT Application No. WO 95/19443 |
| tetracycline inducible | Gatz et al. Plant J. 2: 397-404 (1992) |
| Ethanol inducible | PCT Application No. WO 93/21334 |
| pathogen inducible | Ward et al., 1993 Plant. Mol. Biol. 22: 361-366 |
| PRP1 | |
| heat inducible hsp80 | U.S. Pat. No. 5,187,267 |
| cold inducible alpha- | PCT Application No. WO 96/12814 |
| amylase | |
| Wound-inducible pinII | European Patent No. 375091 |
| RD29A-salt-inducible | Yamaguchi-Shinozalei et al. (1993) Mol. Gen. Genet. |
| | 236: 331-340 |
| plastid-specific viral | PCT Application No. WO 95/16783 and. WO 97/06250 |
| RNA-polymerase | |

[0277] Other promoters, e.g. superpromoter (Ni et al., Plant Journal 7, 1995: 661-676), Ubiquitin promoter (Callis et al., J. Biol. Chem., 1990, 265: 12486-12493; U.S. Pat. No. 5,510,474; U.S. Pat. No. 6,020,190; Kawalleck et al., Plant. Molecular Biology, 1993, 21: 673-684) or 34S promoter (GenBank Accession numbers M59930 and X16673) were similar useful for the present invention and are known to a person skilled in the art.

[0278] Developmental stage-preferred promoters are preferentially expressed at certain stages of development. Tissue and organ preferred promoters include those that are preferentially expressed in certain tissues or organs, such as leaves, roots, seeds, or xylem. Examples of tissue preferred and organ preferred promoters include, but are not limited to fruit-preferred, ovule-preferred, male tissue-preferred, seed-preferred, integument-preferred, tuber-preferred, stalk-preferred, pericarp-preferred, and leaf-preferred, stigma-preferred, pollen-preferred, anther-preferred, a petal-preferred, sepal-preferred, pedicel-preferred, silique-preferred, stem-preferred, root-preferred promoters, and the like. Seed preferred promoters are preferentially expressed during seed development and/or germination. For example, seed preferred promoters can be embryo-preferred, endosperm preferred, and seed coat-preferred. See Thompson et al., 1989, BioEssays 10:108. Examples of seed preferred promoters include, but are not limited to, cellulose synthase (celA), Cim1, gamma-zein, globulin-1, maize 19 kD zein (cZ19B1), and the like.

[0279] Other promoters useful in the expression cassettes of the invention include, but are not limited to, the major chlorophyll a/b binding protein promoter, histone promoters, the Ap3 promoter, the β-conglycin promoter, the napin promoter, the soybean lectin promoter, the maize 15 kD zein promoter, the 22 kD zein promoter, the 27 kD zein promoter, the g-zein promoter, the waxy, shrunken 1, shrunken 2 and bronze promoters, the Zm13 promoter (U.S. Pat. No. 5,086,169), the maize polygalacturonase promoters (PG) (U.S. Pat. Nos. 5,412,085 and 5,545,546), and the SGB6 promoter (U.S. Pat. No. 5,470,359), as well as synthetic or other natural promoters.

[0280] Additional flexibility in controlling heterologous gene expression in plants may be obtained by using DNA binding domains and response elements from heterologous sources (i.e., DNA binding domains from non-plant sources). An example of such a heterologous DNA binding domain is the LexA DNA binding domain (Brent and Ptashne, 1985, Cell 43:729-736).

[0281] The invention further provides a recombinant expression vector comprising a SRP DNA molecule of the invention cloned into the expression vector in an antisense orientation. That is, the DNA molecule is operatively linked to a regulatory sequence in a manner that allows for expression (by transcription of the DNA molecule) of an RNA molecule that is antisense to a SRP mRNA. Regulatory sequences operatively linked to a nucleic acid molecule cloned in the antisense orientation can be chosen which direct the continuous expression of the antisense RNA molecule in a variety of cell types. For instance, viral promoters and/or enhancers, or regulatory sequences can be chosen which direct constitutive, tissue specific, or cell type specific expression of antisense RNA. The antisense expression vector can be in the form of a recombinant plasmid, phagemid, or attenuated virus wherein antisense nucleic acids are produced under the control of a high efficiency regulatory region. The activity of the regulatory region can be determined by the cell type, into which the vector is introduced. For a discussion of the regulation of gene expression using antisense genes, see Weintraub, H. et al., 1986, Antisense RNA as a molecular tool for genetic analysis, Reviews—Trends in Genetics, Vol. 1(1), and Mol et al., 1990, FEBS Letters 268:427-430.

[0282] Another aspect of the invention pertains to host cells into which a recombinant expression vector of the invention has been introduced. The terms “host cell” and “recombinant host cell” are used interchangeably herein. It is understood that such terms refer not only to the particular subject cell but they also apply to the progeny or potential progeny of such a cell. Because certain modifications may occur in succeeding generations due to either mutation or environmental influences, such progeny may not, in fact, be identical to the parent cell, but are still included within the scope of the term as used herein. A host cell can be any prokaryotic or eukaryotic cell. For example, a SRP can be expressed in bacterial cells such as C. glutamicum, yeast, E. coli, insect cells, fungal cells, or mammalian cells (such as Chinese hamster ovary cells (CHO) or COS cells), algae, ciliates, plant cells, fungi, or other microorganisms like C. glutamicum. Other suitable host cells are known to those skilled in the art.

[0283] A host cell of the invention, such as a prokaryotic or eukaryotic host cell in culture, can be used to produce (i.e., express) a SRP. Accordingly, the invention further provides methods for producing SRPs using the host cells of the invention. In one embodiment, the method comprises culturing the host cell of invention (into which a recombinant expression vector encoding a SRP has been introduced, or into which genome has been introduced a gene encoding a wild-type or altered SRP) in a suitable medium until SRP is produced. In another embodiment, the method further comprises isolating SRPs from the medium or the host cell.

[0284] Another aspect of the invention pertains to isolated SRPs, and biologically active portions thereof. An “isolated” or “purified” polypeptide or biologically active portion thereof is free of some of the cellular material when produced by recombinant DNA techniques, or chemical precursors or other chemicals when chemically synthesized. The language “substantially free of cellular material” includes preparations of SRP, in which the polypeptide is separated from some of the cellular components of the cells in which it is naturally or recombinantly produced. In one embodiment, the language “substantially free of cellular material” includes preparations of a SRP having less than about 30% (by dry weight) of non-SRP material (also referred to herein as a “contaminating polypeptide”), more preferably less than about 20% of non-SRP material, still more preferably less than about 10% of non-SRP material, and most preferably less than about 5% non-PKSRP material.

[0285] When the SRP or biologically active portion thereof is recombinantly produced, it is also preferably substantially free of culture medium, i.e., culture medium represents less than about 20%, more preferably less than about 10%, and most preferably less than about 5% of the volume of the polypeptide preparation. The language “substantially free of chemical precursors or other chemicals” includes preparations of SRP in which the polypeptide is separated from chemical precursors or other chemicals that are involved in the synthesis of the polypeptide.

[0286] In one embodiment, the language “substantially free of chemical precursors or other chemicals” includes preparations of a SRP having less than about 30% (by dry weight) of chemical precursors or non-SRP chemicals, more preferably less than about 20% chemical precursors or non-SRP chemicals, still more preferably less than about 10% chemical precursors or non-SRP chemicals, and most preferably less than about 5% chemical precursors or non-SRP chemicals. In preferred embodiments, isolated polypeptides, or biologically active portions thereof, lack contaminating polypeptides from the same organism from which the SRP is derived. Typically, such polypeptides are produced by recombinant expression of, for example, a Saccharomyces cerevisiae, E. coli, Brassica napus, Glycine max, or Oryza sativa SRP in plants other than Saccharomyces cerevisiae, E. coli, Brassica napus, Glycine max, or Oryza sativa, or microorganisms such as C. glutamicum, ciliates, algae or fungi.

[0287] The nucleic acid molecules, polypeptides, polypeptide homologs, fusion polypeptides, primers, vectors, and host cells described herein can be used in one or more of the following methods: identification of Saccharomyces cerevisiae, E. coli, Brassica napus, Glycine max, or Oryza sativa and related organisms; mapping of genomes of organisms related to Saccharomyces cerevisiae, E. coli, Brassica napus, Glycine max, or Oryza sativa; identification and localization of Saccharomyces cerevisiae, E. coli, Brassica napus, Glycine max, or Oryza sativa sequences of interest; evolutionary studies; determination of SRP regions required for function; modulation of a SRP activity; modulation of the metabolism of one or more cell functions; modulation of the transmembrane transport of one or more compounds; modulation of stress resistance; and modulation of expression of SRP nucleic acids.

[0288] The SRP nucleic acid molecules of the invention are also useful for evolutionary and polypeptide structural studies. The metabolic and transport processes in which the molecules of the invention participate are utilized by a wide variety of prokaryotic and eukaryotic cells; by comparing the sequences of the nucleic acid molecules of the present invention to those encoding similar enzymes from other organisms, the evolutionary relatedness of the organisms can be assessed. Similarly, such a comparison permits an assessment of which regions of the sequence are conserved and which are not, which may aid in determining those regions of the polypeptide that are essential for the functioning of the enzyme. This type of determination is of value for polypeptide engineering studies and may give an indication of what the polypeptide can tolerate in terms of mutagenesis without losing function.

[0289] Manipulation of the SRP nucleic acid molecules of the invention may result in the production of SRPs having functional differences from the wild-type SRPs. These polypeptides may be improved in efficiency or activity, may be present in greater numbers in the cell than is usual, or may be decreased in efficiency or activity.

[0290] There are a number of mechanisms by which the alteration of a SRP of the invention may directly affect stress response and/or stress tolerance. In the case of plants expressing SRPs, increased transport can lead to improved salt and/or solute partitioning within the plant tissue and organs. By either increasing the number or the activity of transporter molecules, which exportionic molecules from the cell, it may be possible to affect the salt tolerance of the cell.

[0291] The effect of the genetic modification in plants, C. glutamicum, fungi, algae, or ciliates on stress tolerance can be assessed by growing the modified microorganism or plant under less than suitable conditions and then analyzing the growth characteristics and/or metabolism of the plant. Such analysis techniques are well known to one skilled in the art, and include dry weight, wet weight, polypeptide synthesis, carbohydrate synthesis, lipid synthesis, evapotranspiration rates, general plant and/or crop yield, flowering, reproduction, seed setting, root growth, respiration rates, photosynthesis rates, etc. (Applications of HPLC in Biochemistry in: Laboratory Techniques in Biochemistry and Molecular Biology, vol. 17; Rehm et al., 1993 Biotechnology, vol. 3, Chapter III: Product recovery and purification, page 469-714, VCH: Weinheim; Belter, P. A. et al., 1988, Bioseparations: downstream processing for biotechnology, John Wiley and Sons; Kennedy, J. F. and Cabral, J. M. S., 1992, Recovery processes for biological materials, John Wiley and Sons; Shaeiwitz, J. A. and Henry, J. D., 1988, Biochemical separations, in: Ulmann's Encyclopedia of Industrial Chemistry, vol. B3, Chapter 11, page 1-27, VCH: Weinheim; and Dechow, F. J., 1989, Separation and purification techniques in biotechnology, Noyes Publications).

[0292] For example, yeast expression vectors comprising the nucleic acids disclosed herein, or fragments thereof, can be constructed and transformed into Saccharomyces cerevisiae using standard protocols. The resulting transgenic cells can then be assayed for fail or alteration of their tolerance to drought, salt, and temperature stress. Similarly, plant expression vectors comprising the nucleic acids disclosed herein, or fragments thereof, can be constructed and transformed into an appropriate plant cell such as Arabidopsis, soy, rape, maize, wheat, Medicago truncatula, etc., using standard protocols. The resulting transgenic cells and/or plants derived therefrom can then be assayed for fail or alteration of their tolerance to drought, salt, temperature stress, and lodging.

[0293] The engineering of one or more SRP genes of the invention may also result in SRPs having altered activities, which indirectly impact the stress response and/or stress tolerance of algae, plants, ciliates, or fungi, or other microorganisms like C. glutamicum. For example, the normal biochemical processes of metabolism result in the production of a variety of products (e.g., hydrogen peroxide and other reactive oxygen species), which may actively interfere with these same metabolic processes. For example, peroxynitrite is known to nitrate tyrosine side chains, thereby inactivating some enzymes having tyrosine in the active site (Groves, J. T., 1999, Curr. Opin. Chem. Biol. 3(2):226-235). While these products are typically excreted, cells can be genetically altered to transport more products than is typical for a wild-type cell. By optimizing the activity of one or more PKSRPs of the invention, which are involved in the export of specific molecules, such as salt molecules, it may be possible to improve the stress tolerance of the cell.

[0294] Additionally, the sequences disclosed herein, or fragments thereof, can be used to generate knockout mutations in the genomes of various organisms, such as bacteria, mammalian cells, yeast cells, and plant cells (Girke, T., 1998, The Plant Journal 15:39-48). The resultant knockout cells can then be evaluated for their ability or capacity to tolerate various stress conditions, their response to various stress conditions, and the effect on the phenotype and/or genotype of the mutation. For other methods of gene inactivation, see U.S. Pat. No. 6,004,804 “Non-Chimeric Mutational Vectors” and Puttaraju et al., 1999, Spliceosome-mediated RNA trans-splicing as a tool for gene therapy, Nature Biotechnology 17:246-252.

[0295] The aforementioned mutagenesis strategies for SRPs resulting in increased stress resistance are not meant to be limiting; variations on these strategies will be readily apparent to one skilled in the art. Using such strategies, and incorporating the mechanisms disclosed herein, the nucleic acid and polypeptide molecules of the invention may be utilized to generate algae, ciliates, plants, fungi, or other microorganisms like C. glutamicum expressing mutated PKSRP nucleic acid and polypeptide molecules such that the stress tolerance is, improved.

[0296] The present invention also provides antibodies that specifically bind to a SRP, or a portion thereof, as encoded by a nucleic acid described herein. Antibodies can be made by many well-known methods (See, e.g. Harlow and Lane, “Antibodies; A Laboratory Manual,” Cold Spring Harbor Laboratory, Cold Spring Harbor, N.Y., (1988)). Briefly, purified antigen can be injected into an animal in an amount and in intervals sufficient to elicit an immune response. Antibodies can either be purified directly, or spleen cells can be obtained from the animal. The cells can then fused with an immortal cell line and screened for antibody secretion. The antibodies can be used to screen nucleic acid clone libraries for cells secreting the antigen. Those positive clones can then be sequenced. See, for example, Kelly et al., 1992, Bio/Technology 10:163-167; Bebbington et al., 1992, Bio/Technology 10:169-175.

[0297] The phrases “selectively binds” and “specifically binds” with the polypeptide refer to a binding reaction that is determinative of the presence of the polypeptide in a heterogeneous population of polypeptides and other biologics. Thus, under designated immunoassay conditions, the specified antibodies bound to a particular polypeptide do not bind in a significant amount to other polypeptides present in the sample. Selective binding of an antibody under such conditions may require an antibody that is selected for its specificity for a particular polypeptide. A variety of immunoassay formats may be used to select antibodies that selectively bind with a particular polypeptide. For example, solid-phase ELISA immunoassays are routinely used to select antibodies selectively immunoreactive with a polypeptide. See Harlow and Lane, “Antibodies, A Laboratory Manual,” Cold Spring Harbor Publications, New York, (1988), for a description of immunoassay formats and conditions that could be used to determine selective binding.

[0298] In some instances, it is desirable to prepare monoclonal antibodies from various hosts. A description of techniques for preparing such monoclonal antibodies may be found in Stites et al., eds., “Basic and Clinical Immunology,” (Lange Medical Publications, Los Altos, Calif., Fourth Edition) and references cited therein, and in Harlow and Lane, “Antibodies, A Laboratory Manual,” Cold Spring Harbor Publications, New York, (1988).

[0299] Gene expression in plants is regulated by the interaction of protein transcription factors with specific nucleotide sequences within the regulatory region of a gene. A common type of transcription factor contains zinc finger (ZF) motifs. Each ZF module is approximately 30 amino acids long folded around a zinc ion. The DNA recognition domain of a ZF protein is a α-helical structure that inserts into the major grove of the DNA double helix. The module contains three amino acids that bind to the DNA with each amino acid contacting a single base pair in the target DNA sequence. ZF motifs are arranged in a modular repeating fashion to form a set of fingers that recognize a contiguous DNA sequence. For example, a three-fingered ZF motif will recognize 9 by of DNA. Hundreds of proteins have been shown to contain ZF motifs with between 2 and 37 ZF modules in each protein (Isalan M, et al., 1998 Biochemistry 37(35):12026-33; Moore M, et al., 2001 Proc. Natl. Acad. Sci. USA 98(4):1432-1436 and 1437-1441; U.S. Pat. No. 6,007,988 and U.S. Pat. No. 6,013,453).

[0300] The regulatory region of a plant gene contains many short DNA sequences (cis-acting elements) that serve as recognition domains for transcription factors, including ZF proteins. Similar recognition domains in different genes allow the coordinate expression of several genes encoding enzymes in a metabolic pathway by common transcription factors. Variation in the recognition domains among members of a gene family facilitates differences in gene expression within the same gene family, for example, among tissues and stages of development and in response to environmental conditions.

[0301] Typical ZF proteins contain not only a DNA recognition domain but also a functional domain that enables the ZF protein to activate or repress transcription of a specific gene. Experimentally, an activation domain has been used to activate transcription of the target gene (U.S. Pat. No. 5,789,538 and patent application WO9519431), but it is also possible to link a transcription repressor domain to the ZF and thereby inhibit transcription (patent applications WO00/47754 and WO2001002019). It has been reported that an enzymatic function such as nucleic acid cleavage can be linked to the ZF (patent application WO00/20622)

[0302] The invention provides a method that allows one skilled in the art to isolate the regulatory region of one or more stress related protein encoding genes from the genome of a plant cell and to design zinc finger transcription factors linked to a functional domain that will interact with the regulatory region of the gene. The interaction of the zinc finger protein with the plant gene can be designed in such a manner as to alter expression of the gene and preferably thereby alter metabolic activity to confer increased (or decreased) tolerance of abiotic stress such as drought. The invention provides a method of producing a transgenic plant with a transgene encoding this designed transcription factor, or alternatively a natural transcription factor, that modifies transcription of the Stress-Related Protein, particularly stress related protein gene to provide increased tolerance of environmental stress, which is preferably achieved by altering metabolic activity. Such a regulation of plant genes by artificial polydactyl zinc fingers has been demonstrated by Ordiz et al. (Regulation of transgene Expression in plants with polydactyl zinc finger transcription factors, Ordiz et al., PNAS, 99 (20) 13290-13295, 2002) or Guan et al. (Hertiable endogenous gene regulation in plants with designed polydactyl zinc finger transcription factos, PNAS, Vol. 99 (20), 13296-13301 (2002)).

[0303] In particular, the invention provides a method of producing a transgenic plant with a stress related protein coding nucleic acid, wherein expression of the nucleic acid(s) in the plant results in increased tolerance to environmental stress, which is preferably achieved by altering metabolic activity, as compared to a wild-type plant comprising: (a) transforming a plant cell with an expression vector comprising a stress related protein encoding nucleic acid, and (b) generating from the plant cell a transgenic plant with an increased tolerance to environmental stress as compared to a wild-type plant. For such plant transformation, binary vectors such as pBinAR can be used (Hofgen and Willmitzer, 1990 Plant Science 66:221-230). Moreover suitable binary vectors are for example pBIN19, pBI101, pGPTV or pPZP (Hajukiewicz, P. et al., 1994, Plant Mol. Biol., 25: 989-994).

[0304] Construction of the binary vectors can be performed by ligation of the cDNA into the T-DNA. 5′ to the cDNA a plant promoter activates transcription of the cDNA. A polyadenylation sequence is located 3′ to the cDNA. Tissue-specific expression can be achieved by using a tissue specific promoter as listed above. Also, any other promoter element can be used. For constitutive expression within the whole plant, the CaMV 35S promoter can be used. The expressed protein can be targeted to a cellular compartment using a signal peptide, for example for plastids, mitochondria or endoplasmic reticulum (Kermode, 1996 Crit. Rev. Plant Sci.

[0305] 4(15):285-423). The signal peptide is cloned 5′ in frame to the cDNA to archive subcellular localization of the fusion protein. Additionally, promoters that are responsive to abiotic stresses can be used with, such as the Arabidopsis promoter RD29A. One skilled in the art will recognize that the promoter used should be operatively linked to the nucleic acid such that the promoter causes transcription of the nucleic acid, which results in the synthesis of a mRNA, which encodes a polypeptide.

[0306] Alternate methods of transfection include the direct transfer of DNA into developing flowers via electroporation or Agrobacterium mediated gene transfer. Agrobacterium mediated plant transformation can be performed using for example the GV3101(pMP90) (Koncz and Schell, 1986 Mol. Gen. Genet. 204:383-396) or LBA4404 (Ooms et al., Plasmid, 1982, 7: 15-29; Hoekema et al., Nature, 1983, 303: 179-180) Agrobacterium tumefaciens strain. Transformation can be performed by standard transformation and regeneration techniques (Deblaere et al., 1994 Nucl. Acids. Res. 13:4777-4788; Gelvin and Schilperoort, Plant Molecular Biology Manual, 2nd Ed. —Dordrecht: Kluwer Academic Publ., 1995. —in Sect., Ringbuc Zentrale Signatur: BT11-P ISBN 0-7923-2731-4; Glick, B R and Thompson, J E, Methods in Plant Molecular Biology and Biotechnology, Boca Raton: CRC Press, 1993. —360 S., ISBN 0-8493-5164-2). For example, rapeseed can be transformed via cotyledon or hypocotyl transformation (Moloney et al., 1989 Plant Cell Reports 8:238-242; De Block et al., 1989 Plant Physiol. 91:694-701). Use of antibiotics for Agrobacterium and plant selection depends on the binary vector and the Agrobacterium strain used for transformation. Rapeseed selection is normally performed using kanamycin as selectable plant marker. Agrobacterium mediated gene transfer to flax can be performed using, for example, a technique described by Mlynarova et al., 1994 Plant Cell Report 13:282-285. Additionally, transformation of soybean can be performed using for example a technique described in European Patent No. 0424 047, U.S. Pat. No. 5,322,783, European Patent No. 0397 687, U.S. Pat. No. 5,376,543, or U.S. Pat. No. 5,169,770. Transformation of maize can be achieved by particle bombardment, polyethylene glycol mediated DNA uptake or via the silicon carbide fiber technique (see, for example, Freeling and Walbot “The maize handbook” Springer Verlag: New York (1993) ISBN 3-540-97826-7). A specific example of maize transformation is found in U.S. Pat. No. 5,990,387 and a specific example of wheat transformation can be found in PCT Application No. WO 93/07256.

[0307] The stress related protein encoding nucleic acid molecules of the invention have a variety of uses. Most importantly, the nucleic acid and amino acid sequences of the present invention can be used to transform plant cells or plants, thereby inducing tolerance to stresses such as drought, high salinity, and cold. The present invention therefore provides a transgenic plant transformed by a stress related protein encoding nucleic acid (coding or antisense), wherein expression of the nucleic acid sequence in the plant results in increased tolerance to environmental stress as compared to a wild-type plant. The increased stress tolerance is apparent as an increase in the yield or quality of the plant. The transgenic plant can be a monocot or a dicot or a gymnosperm plant. The invention further provides that the transgenic plant can be selected from maize, wheat, rye, oat, triticale, rice, barley, soybean, peanut, cotton, borage, safflower, linseed, primrose, rapeseed, canola and turnip rape, manihot, pepper, sunflower, tagetes, solanaceous plant such as potato, tobacco, eggplant and tomato, Vicia species, pea, alfalfa, bushy plants, such as coffee, cacao, tea, Salix species, trees, such as oil palm, coconut, perennial grass, such as ryegrass and fescue, and forage crops, such as alfalfa and clover and Arabidopsis thaliana. Further the transgenic plant can be selected from spruce, pine, or fir for example.

[0308] In particular, the present invention describes using the expression of stress related proteins to engineer drought-tolerant, salt-tolerant, and/or cold-tolerant plants. This strategy has herein been demonstrated for Arabidopsis thaliana, Ryegrass, Alfalfa, Rapeseed/Canola, Soybean, Corn and Wheat but its application is not restricted to these plants. Accordingly, the invention provides a transgenic plant containing a stress related protein encoding gene selected from the nucleic acids disclosed in the Sequence Listing and/or homologs of the afore mentioned sequences, wherein the environmental stress is drought, increased salt or decreased or increased temperature but its application is not restricted to these adverse environments. Protection against other adverse conditions such as heat, air pollution, heavy metals, and chemical toxicants, for example, may be obtained. In preferred embodiments, the environmental stress is drought.

[0309] The present invention also provides methods of modifying stress tolerance of a plant comprising, modifying the expression of a stress-related, protein-encoding gene in the plant. The invention provides that this method can be performed such that the stress tolerance is increased. This can for example be done by the use of transcription factors. In particular, the present invention provides methods of producing a transgenic plant having an increased tolerance to environmental stress as compared to a wild-type plant due to increased expression of a stress related protein in the plant.

[0310] Growing the modified plants under stress conditions and then screening and analyzing the growth characteristics and/or metabolic activity assess the effect of the genetic modification in plants on stress tolerance and/or resistance. Such analysis techniques are well known to one skilled in the art. They include next to screening (Römpp Lexikon Biotechnologie, Stuttgart/New York: Georg Thieme Verlag 1992, “screening” p. 701) dry weight, wet weight, protein synthesis, carbohydrate synthesis, lipid synthesis, evapotranspiration rates, general plant and/or crop yield, flowering, reproduction, seed setting, root growth, respiration rates, photosynthesis rates, etc. (Applications of HPLC in Biochemistry in: Laboratory Techniques in Biochemistry and Molecular Biology, vol. 17; Rehm et al., 1993 Biotechnology, vol. 3, Chapter III: Product recovery and purification, page 469-714, VCH: Weinheim; Better, P. A. et al., 1988 Bioseparations: downstream processing for biotechnology, John Wiley and Sons; Kennedy, J. F. and Cabral, J. M. S., 1992 Recovery processes for biological materials, John Wiley and Sons; Shaeiwitz, J. A. and Henry, J. D., 1988 Biochemical separations, in: Ulmann's Encyclopedia of Industrial Chemistry, vol. B3, Chapter 11, page 1-27, VCH: Weinheim; and Dechow, F. J. (1989) Separation and purification techniques in biotechnology, Noyes Publications).

[0311] The engineering of one or more stress-related, protein-encoding genes of the invention may also result in stress-related proteins having altered activities, which indirectly impact the stress response and/or stress tolerance of plants. For example, the normal biochemical processes of metabolism result in the production of a variety of products (e.g., hydrogen peroxide and other reactive oxygen species), which may actively interfere with these same metabolic processes (for example, peroxynitrite is known to react with tyrosine side chains, thereby inactivating some enzymes having tyrosine in the active site (Groves, J. T., 1999 Curr. Opin. Chem. Biol. 3(2):226-235). By optimizing the activity of one or more stress related proteins (enzymes) of the invention, it may be possible to improve the stress tolerance of the cell.

[0312] Throughout this application, various publications are referenced. The disclosures of all of these publications and those references cited within those publications in their entireties are hereby incorporated by reference into this application in order to more fully describe the state of the art to which this invention pertains.

[0313] It should also be understood that the foregoing relates to preferred embodiments of the present invention and that numerous changes and variations may be made therein without departing from the scope of the invention. The invention is further illustrated by the following examples, which are not to be construed in any way as limiting. On the contrary, it is to be clearly understood that various other embodiments, modifications and equivalents thereof, which, after reading the description herein, may suggest themselves to those skilled in the art without departing from the spirit of the present invention and/or the scope of the claims.

[0314] The invention also pertains to the use of SRP encoding nucleic acid selected form the group comprising a nucleic acid disclosed in the Sequence Listing and/or homologs of the afore mentioned sequences for preparing a plant cell with increased environmental stress tolerance, which is preferably achieved by altering metabolic activity. The said sequences can also be used for preparing a plant with increased environmental stress tolerance.

[0315] Object of the invention is further the use of altered metabolic activity and/or a SRP encoding nucleic acid selected form the group of sequences disclosed in the Sequence Listing and/or homologs of the afore mentioned sequences or parts thereof as markers for selection of plants with increased tolerance to environmental stress or as markers for detection of stress in plants or plant cells.

### EXAMPLE 1

### Engineering Stress-Tolerant Arabidopsis Plants by Over-Expressing Stress Related Protein Genes

[0316] Gene cloning and transformation of Arabidopsis thaliana Amplification. The standard protocol of Pfu DNA polymerase or a Pfu/Taq DNA polymerase mix (Herculase) was used for the amplification procedure. Amplified ORF fragments were analyzed by gel electrophoresis. Each primer consists of a universal 5′ end and ORF specific 3′ end, whereby the universal sequences differ for the forward and reverse primers (forward primer sequence contains an EcoRI for yeast or SmaI for E. coli, and the reverse primer sequence a SmaI for yeast or SacI for E. coli restriction site) allowing generally a unidirectional cloning success.

[0317] Amplification using the protocol of Pfu or Herculase DNA polymerase (Stratagene). Conditions: 1×PCR buffer, 0.2 mM dNTP, 100 ng genomic DNA Saccharomyces cerevisiae (S288C) or 60 ng genomic DNA Escherichia coli K-12 (MG1655), 25 μmol forward primer, 25 μmol reverse primer, 2.5 u Pfu or Herculase DNA polymerase: 1st cycle for 3′ for yeast of 2′ for E. coli at 94° C., followed by 25 cycles for 30″ at 94° C., 30″ 55° C. for yeast or 60° C. for E. coli and 5-6′ 72° C., followed by 1 cycle for 610′ at 72° C., final for 4° C. at ∞.

TABLE 2
Forward and reverse primer sequences used for
ORF amplification (SEQ ID NOS 257-508, in order
of appearance).

| Gene | |
|---|---|
| | Forward Seq |
| b0025 | ATGAAGCTGATACGCGGCATAC |
| b0061 | ATGTTAGAAGATCTCAAACGCCA |
| b0141 | ATGTCTAAAAAATTAGGTTTTGCCCT |
| bO144 | ATGCTCCCGCCTTATTTTTTGTTC |
| b0148 | ATGCTACAATGTGGCGCGAAGAA |
| b0318 | ATGAGTATAAAAAATCTACCTGCCG |
| b0328 | ATGATGCAGTTAGTTCACTTATTTATG |
| b0361 | ATGGATAGCGCACGCGCCCTTA |
| b0723 | ATGAAATTGCCAGTCAGAGAATTTG |
| b0726 | ATGCAGAACAGCGCTTTGAAAGC |
| b0880 | ATGGAAAAGGGTACTGTTAAGTG |
| b1069 | ATGAATTTATTAAAATCGCTGGCCG |
| b1080 | ATGATTAAATTTCTCTCTGCATTAATTC |
| b1130 | ATGCGCGTACTGGTTGTTGAAGA |
| b1221 | ATGAGTAATCAGGAACCGGC |
| b1350 | ATGAGCACAAAACCACTCTTCCTG |
| b1392 | ATGACAACGTTTCATTCCTTAAC |
| b1557 | ATGTCAAATAAAATGACTGGTTTAGTA |
| b1650 | ATGTCATCTGAAAAACTGTATTCCC |
| b1717 | ATGCCAAAAATTAAGACCGTACGC |
| b1779 | ATGACTATCAAAGTAGGTATCAACG |
| b2164 | ATGGATATAATGAGAAGTGTTGTGG |
| b2194 | ATGAGGTTTTTATTGGGCGTGCTG |
| b2197 | ATGAATATTCGCCGTAAAAACCG |
| b2231 | ATGAGCGACCTTGCGAGAGAAAT |
| b2246 | ATGACAACGGTAACGCCCACATAT |
| b2287 | ATGGATTATACGCTCACCCGCAT |
| b2488 | ATGCTGAAGTTACTGAAAACTATTATG |
| b2699 | ATGGCTATCGACGAAAACAAACAG |
| b2733 | ATGAGTGCAATAGAAAATTTCGA |
| b2886 | ATGATGAAATCGTTAATTATCGTTAATC |
| b2926 | ATGTCTGTAATTAAGATGACCG |
| b2980 | ATGAAAGATGAACGTCGCCCTATT |
| b2987 | ATGCTAAATTTATTTGTTGGCCTTGA |
| b3030 | ATGACGCAAACTTATAACGCTG |
| b3066 | ATGGCTGGACGAATCCCACGC |
| b3067 | ATGGAGCAAAACCCGCAGTCAC |
| b3358 | ATGTGGCGCAGACTGATTTATCAC |
| b3604 | ATGATTGTTTTACCCAGACGCCTG |
| b3687 | ATGCGTAACTTTGATTTATCCCCG |
| b3811 | ATGACCGATTTACACACCGATGTA |
| b4074 | ATGTTGACCCCGTTGACGGCCT |
| b4090 | ATGAAAAAGATTGCATTTGGCTGTG |
| b4351 | ATGACGGTTCCTACCTATGACAAA |
| YAL005C | ATGTCAAAAGCTGTCGGTATTGATT |
| YAL025C | ATGTCCGACGAAATTGTTTGGCAA |
| YAL047C | ATGGTACGTCGATGGATTCCTAGT |
| YAR028W | ATGCAAACACCTTCAGAAAATACCG |
| YAR068W | ATGCCACAAGTACAGTCGTGGTTT |
| YBL021C | ATGAATACCAACGAGTCCGAACAT |
| YBL100C | ATGTTGTTCAAACCAAAAACACGAG |
| YBL109W | ATGTCCCTACGGCCTTGTCTAAC |
| YBR004C | ATGATTGTGGGGTTGACACTTTATT |
| YBR101C | ATGGAAAAGCTATTACAGTGGTCTA |
| YBR128C | ATGCATTGCCCAATTTGCCACCAT |
| YBR176W | ATGAATATAATGAAAAGACAATTATGCA |
| YBR204C | ATGAATATGGCAGAACGTGCAGAA |
| YBR243C | ATGTTGCGACTTTTTTCACTGGCA |
| YDL199C | ATGAAACCTCCGTTAAACATGTCAC |
| YDL212W | ATGTTCTCATATTCAGATTTCTGTTC |
| YDL242W | ATGAATTTAGAAGAGAGCCAATCAAA |
| YDL248W | ATGAAAGAGAATGAAGTCAAAGATGA |
| YDR446W | ATGACTGTTATAAAGACAGAACCAAC |
| YDR467C | ATGATTTATATGTTGGTTTTTCTGGAT |
| YDR476C | ATGTGGGATTCGTTAATTGTAAGCA |
| YDR524C | ATGGATTTTTATACTACTGATATCAAC |
| YDR526C | ATGCCTTGCTTGTTGCCACCTAC |
| YEL020W-A | ATGGACGCATTGAACTCCAAAGAAC |
| YEL059W | ATGAGTCTTTCTTTCCTTCTCTTTTC |
| YER075C | ATGAAGGACAGTGTAGACTGCCC |
| YER085C | ATGAATTTCAAGGAGCCGCTAGTG |
| YER148W | ATGGCCGATGAGGAACGTTTAAAG |
| YER159C | ATGGCAGATCAAGTACCAGTTACAA |
| YER185W | ATGTCCACAACTGATTCGGGGTT |
| YFL029C | ATGAAACTGGATAGTATAGACATTAC |
| YFL038C | ATGAATAGCGAGTACGATTACCTGT |
| YGL028C | ATGATTTCACCCATAAGCTTTCTATC |
| YGL186C | ATGAATAGGGACAACATGGACACAA |
| YGL196W | ATGGAAGAAGTGAAAGCAGTCAATT |
| YGL217C | ATGAGCATTCTATCATCCACACAAT |
| YGR006W | ATGGACCTAGATCTAGCCAGTATC |
| YGR070W | ATGAATAGTAATGAACTGGATCTAAG |
| YGR111W | ATGACAGCCTCATCAAATGACGAT |
| YGR182C | ATGTCTCGCCAAAGCGCATTCAAA |
| YHR005C-A | ATGTCTTTCTTAGGTTTCGGTGGT |
| YHR169W | ATGGCAGACTTTAAATCTTTAGGTC |
| YHR203C | ATGGCTAGAGGACCGTATGTTGAT |
| YIL012W | ATGTGCCTAGGTAAGCTGTACTTC |
| YIL046W | ATGAGGAGAGAGAGGCAAAGGAT |
| YIL059C | ATGAATTTCTCCACAGTTTTTCAAGC |
| YIL096C | ATGGCCAGGAAATTGAAGGGTAAG |
| YIL100W | ATGTATATATATGTTGAAGTGTGTACA |
| YIL128W | ATGACACCAGACGAACTAAATTCAG |
| YIL166C | ATGTCCGTACAAAAAGAAGAATACG |
| YIL172C | ATGACTATTTCTTCTGCACATCCAG |
| YJL010C | ATGGGAAAGACTAAAACAAGAGGCA |
| YJL021C | ATGCCAAATACTGCTCCGCCACT |
| YJL038C | ATGAGGTTCCAGCTTTTCATATATTT |
| YJL151C | ATGGACAGAGACCATATTAATGACC |
| YJR034W | ATGGTAGCTAGTTGTAAAGATCAGA |
| YJR078W | ATGAACAACACTTCCATAACCGGA |
| YJR153W | ATGATTTCTGCTAATTCATTACTTATTT |
| YKL026C | ATGCAAGAATTTTATTCTTTTTCACCA |
| YKL047W | ATGAATTCCGGAGGTGAAGAACCA |
| YKL075C | ATGGCTAAAGATTTATTGCCCAAGC |
| YKL081W | ATGTCCCAAGGTACTTTATACATTAA |
| YKL096W-A | ATGCAATTCTCTACTGTCGCTTCC |
| YLR104W | ATGAGTCAAAGTCGCTGGAGTATC |
| YLR128W | ATGGTATGTTTTTAATTTCGTTTCTTTA |
| YLR354C | ATGTCTGAACCAGCTCAAAAGAAAC |
| YLR406C | ATGGCCGGTTTAAAAGACGTTGTC |
| YLR414C | ATGAGGAATTTTTTCACGTTATTTTTTG |
| YML090W | ATGCTTGTTTTTTCTTTTCTGTTTGTT |
| YMR217W | ATGGCTGCCGGTGAACAAGTTTC |
| YNL010W | ATGGTCAAAGCTGTTATTTTTACCG |
| YNL065W | ATGTCACGAAGTAACAGTATATACAC |
| YNL206C | ATGTCAAAATTGTTCTTAGATGAACTG |
| YNL276C | ATGTGTGGTATCTATCCCTACCAG |
| YNL279W | ATGAGCGGTTTTAAATGCTATTTGC |
| YNR015W | ATGGTTACATATGCTGGAAAACTGG |
| YOL055C | ATGACCTATTCTACAGTTAGCATCA |
| YPL091W | ATGCTTTCTGCAACCAAACAAACAT |
| YPL151C | ATGGACGGAAATGATCACAAAGTC |
| YPL197C | ATGAAGAGAAATATTATTTATTATACATTG |
| YPL224C | ATGCTACGGATAAGTATTGACTCTA |
| YPR055W | ATGGATTACCTAAAACCAGCGCAG |
| | Reverse Seq |
| b0025 | TTAAGCCGGTTTTGTTAGCCCAAA |
| b0061 | TTACTGCCCGTAATATGCCTTCGC |
| b0141 | TTACTGATAAGTAATGGTGTATGCAG |
| b0144 | TTAGCATGACGCATTTGAGAATGTTG |
| b0148 | TTACGAATACTTTTTCGTCCGTCGC |
| b0318 | TTATGCACCTGCGGCAATCAGTA |
| b0328 | TTACCGCTGCGTCACCCCTTCG |
| b0361 | TTATATTTCCAGACATCTGTTATCACT |
| b0723 | TTAGTAAGTACGAATCTTCGGCGG |
| b0726 | TTATTCGACGTTCAGCGCGTCAT |
| b0880 | TTATGCGACTGCCGCTTCTACTTC |
| b1069 | TTACACCGTCCGGCGGGCA |
| b1080 | TTAGATGATTTCCAGTTTTGCCCGC |
| b1130 | TTAGCGCAATTCGAACAGATAGCCC |
| b1221 | TTAGAAAATGCGCTCCTGATGCACC |
| b1350 | TTAGTCATTTGCATATTCCTTAGCC |
| b1392 | TTATGCCATCCCCTTCGCGTCAAA |
| b1557 | TTAATCAGTAATGATGACATTTGCTG |
| b1650 | TTACAACGTCGGGTAATCGGTATA |
| b1717 | TTATGCGTACGGCAGGCACGC |
| b1779 | TTATTTGGAGATGTGAGCGATCAG |
| b2164 | TTACGCCAGACCAATAAAGAACCC |
| b2194 | TTATTTACTCTCCTGCGGCGACA |
| b2197 | TTATGATGCTGGGTCCTTATAAACAC |
| b2231 | TTATTCTTCTTCTGGCTCGTCGTC |
| b2246 | TTAATGATGTGCCACGTCGGTCT |
| b2287 | TTAAATCTCGTCAGGTGTACGCAG |
| b2488 | TTATAGCTGCTCCTTAGCCACCAG |
| b2699 | TTAAAAATCTTCGTTAGTTTCTGCTAC |
| b2733 | TTACACCAGGCTCTTCAAGCGAT |
| b2886 | TTAGAGAGGATTCTCACCGCTGGC |
| b2926 | TTACTTCTTAGCGCGCTCTTCGA |
| b2980 | TTAACTCAGGTTCATCTCCAGCGG |
| b2987 | TTAAATCAACTGCAATGCTATCCA |
| b3030 | TTAAACCTCAATCTCCGCCATGTC |
| b3066 | TTACTTTTTCGCCAGCTCCTGGTTT |
| b3067 | TTAATCGTCCAGGAAGCTACGCA |
| b3358 | TTACGCCTTCGAATCCCGCAAC |
| b3604 | TTATGCGTTTTTCTCCCTCGAATGC |
| b3687 | TTAGTTGATTTCGATACGGCGCG |
| b3811 | TTATTTCCCCCGTTTGGCGCGT |
| b4074 | TTATTCATCGCGCTTCTTCCCCC |
| b4090 | TTAATTTCTCCGCTGCTCTATTGCC |
| b4351 | TTACTCAAAATAGTCCATATCCAGTTTC |
| YAL005C | TTAATCAACTTCTTCAACGGTTGGA |
| YAL025C | TTATTGTGCCACTTCTTGCTCAGC |
| YAL047C | TTAGGGATTGTTGATTGATAGGTTG |
| YAR028W | TCAAGGTAAATCAGCGTCAGGATAT |
| YAR068W | TCAAACCAGCAGCCATACCTTCG |
| YBL021C | TCAAGGCACCTCTTCGTCGTCC |
| YBL100C | TCAGCTCTCATAACTATCGCAAGAA |
| YBL109W | TCAATATGGAGGGTAGAACAACAGT |
| YBR004C | TCAGGCTGGTGGTAAAAAAGCTG |
| YBR101C | TCATAATACATACTTTACGGCTAAATA |
| YBR128C | CTAGCCTACCACGTACCATCGG |
| YBR176W | TTACTTTTCGTTAATTGAAGAGAGGA |
| YBR204C | CTACAATTTGGAATTATCAATCACCT |
| YBR243C | TCAACGTACTGTCCATAGGTTGTC |
| YDL199C | CTAGGCAACTGCCATGTCTCCA |
| YDL212W | CTATTTTTTGGCGTTCTTCCTCTTT |
| YDL242W | TCAAATTTTGAAGCCGAAGTTGGTA |
| YDL248W | TCATTTCTTCATTAAAGACTCTTCATT |
| YDR446W | TTATATAATATTGAGAATTTCATTAGCC |
| YDR467C | TCAAATCAAAACAACAGGATATCGAC |
| YDR476C | CTAATTAACTGACCCTTCGCCAAG |
| YDR524C | TTATTTTTTGTCCTTTTTGGCCAATTT |
| YDR526C | TCACTCTGCCACCATCGTAATGG |
| YEL020W-A | TTATCGGCCCAAGCCTTGTCCCA |
| YEL059W | TTAACTGTAGGCTGTGCCGACAT |
| YER075C | CTATTGTGGCAATTCTTTCAACTTAT |
| YER085C | TTAATTAATAGTCTTCTTCTTTCTTATC |
| YER148W | TCACATTTTTCTAAATTCACTTAGCAC |
| YER159C | TCAGGCACTCTCTTCCTCCGGT |
| YER185W | CTAATTACTTAACGTTTGACACTCC |
| YFL029C | TTATGGCTTTTCTAATTCTTGCAAGA |
| YFL038C | TCAACAGCAGCCCCCACCGGT |
| YGL028C | TTATGGAAAATATTCAATCACACCGA |
| YGL186C | TTAACGACCAAATTTACGTAGCTCT |
| YGL196W | CTAATTTAATGGAGTAGTTTCGTTCC |
| YGL217C | TTAACTACTTGAGTTTTCTTTCCAGC |
| YGR006W | TTATGTTAGCAGCATTCCGGCCT |
| YGR070W | TCAAAAATTTAACAGTTCGATAATTTCA |
| YGR111W | TTAAAACCAACAGAATTTGGTATTGTT |
| YGR182C | TCAAAGGCTTACATCTCCAGAATC |
| YHR005C-A | CTAAAACTTACCGGCTGCGTTAAAT |
| YHR169W | TCAAGAGCGCAAACTTTTCCCGT |
| YHR203C | TTACAAACCTTGTTGAGCTCTTCTT |
| YIL012W | CTACACACGTTTCCAACCTCTGC |
| YIL046W | CTAATCATTGAGATCGAATTTGTACA |
| YIL059C | TCACATACATACCTGCGGTAGCAA |
| YIL096C | TTAGTCTGAATCAGAATCTGTGTCT |
| YIL100W | TTATTCACCCTCACCCCTAATACC |
| YIL128W | TTACTCGAACGGGATTTGGCCTAA |
| YIL166C | CTAGTGAATAAACCTATAATCAAGAC |
| YIL172C | TCATTCAGATATGTAAATTCTGCCC |
| YJL010C | TTATCTATAGTGCTTTTGCTTTTTGAA |
| YJL021C | TTACCAACCTACGTATCCTCTCG |
| YJL038C | TTATTGAATAGCATTATATATTAGTGCC |
| YJL151C | CTAAGTACGGCCGGAAGAGAGC |
| YJR034W | TCAGTCCTTCTGCTGGCTGTTCA |
| YJR078W | TCAATTTTTATCTTCATTTTTAATGTCC |
| YJR153W | TTAACAGCTTGCACCAGATCCAGA |
| YKL026C | TTAAATCTGTTCTTCTGGTGGTTGA |
| YKL047W | TTAACAGAGATTTCCCAAACATTCTG |
| YKL075C | TTATATCCATTTCTGTCTTGCAGCA |
| YKL081W | TTATTTCAAAACCTTACCGTCAACAA |
| YKL096W-A | TTATAACAACATAGCAGCAGCAGCT |
| YLR104W | TCAATGGTTTTTGTAAGCATCTGATA |
| YLR128W | TTATTGCTGATCCTGTAAGCACTCA |
| YLR354C | TTAAGCGGTAACTTTCTTTTCAATCA |
| YLR406C | TTAAGCATCTTCTTCAACGACAACG |
| YLR414C | TCAAATCAATGGTTTTTCCTCAATTG |
| YML090W | TCAATTACAAATCCATGGATTAAGTTG |
| YMR217W | TCATTCCCATTCAACAGTTGCAGG |
| YNL010W | CTAATTTTCCATCAATTCAGCGACT |
| YNL065W | TTAATTATGATTATCGTTCTGGTCTC |
| YNL206C | TCAATCGTATTCTACTCCGGATCC |
| YNL276C | TTACATTGCCATCACACGTAAACTG |
| YNL279W | TCAGTCAAAGGTGGCTTTGCGAA |
| YNR015W | TTATATATCTGTGGGAAGGGGTACA |
| YOL055C | CTACTCGTATTCTAGCGCAGCG |
| YPL091W | TCATCTCATAGTAACCAATTCTTCTG |
| YPL151C | CTAAAATCTTTTGGCGCTTAAGTTG |
| YPL197C | CTATTGAAGTTGATTGAACCATACGT |
| YPL224C | TTACATCAACAAACTCGACGTCCA |
| YPR055W | TCATTTTTCGTTTGCAGTATGGACA |

[0318] Vector preparation. The preferred binary vector 1 bxbigResgen for yeast and 1 bxSuperCoLic for E. coli, which is based on the modified pPZP binary vector backbone (comprising the kanamycin-gene for bacterial selection; Hajukiewicz, P. et al., 1994, Plant Mol. Biol., 25: 989-994) carried the selection marker bar-gene (De Block et al., 1987, EMBO J. 6, 2513-2518) driven by the mas1′ promoter (Velten et al., 1984, EMBO J. 3, 2723-2730; Mengiste, Amedeo and Paszkowski, 1997, Plant J., 12, 945-948) on its T-DNA. In addition the T-DNA contained the strong double 35S (Kay et al., 1987, Science 236, 1299-1302) for yeast or Super promoter (Ni et al., 1995, Plant Journal 7, 661-676) for E. coli in front of a cloning cassette followed by the nos-terminator (Depicker A. Stachel S. Dhaese P. Zambryski P. Goodman HM. Nopaline synthase: transcript mapping and DNA sequence. Journal of Molecular & Applied Genetics. 1(6):561-73, 1982). The cloning cassette consists of the following sequence:

‘Yeast:

(SEQ ID NO: 533)

5′-GGAATTCCAGCTGACCACCATGGCAATTCCCGGGGATC-3
or
E.coli:

(SEQ ID NO: 534)

5′-TTG CTC TTC CAT GGC AAT GAT TAA TTA ACG AAG
AGC AA-3′,
respectively.

[0319] Other selection marker systems, like the AHAS marker or other promoters, e.g. superpromoter (see above), 35S promoter (see above), Ubiquitin promoter (Callis et al., J. Biol. Chem., 1990, 265: 12486-12493; U.S. Pat. No. 5,510,474; U.S. Pat. No. 6,020,190; Kawalleck et al., Plant. Molecular Biology, 1993, 21: 673-684) or 34S promoter (GenBank Accession numbers M59930 and X16673) were similar useful for the instant invention and are known to a person skilled in the art. The vector was linearised with EcoR and SmaI for yeast or SmaI and SacI for E. coli using the standard protocol provided by the supplier (MBI Fermentas, Germany) and purified using Qiagen columns (Qiagen, Hilden, Germany).

[0320] Ligation and transformation. Present ORF fragments (˜100 ng) were digested by EcoRI and SmaI for yeast and SmaI and SacI for E. coli using the standard protocol provided by the supplier (MBI Fermentas, Germany), purified using Qiagen columns (Qiagen, Hilden, Germany) and were ligated into the cloning cassette of the binary vector systems (˜30 ng) using standard procedures (Maniatis et al.).

[0321] In the case of internal EcoRI, SmaI and SacI restriction sites a blunt end cloning procedure was applied. The undigested ORF fragments were directly purified and ligated into the cloning cassette of the binary vector. In this case the EcoRI site was refilled by Klenow reaction and the SacI site blunted Pfu DNA polymerase.

[0322] Ligation products were transformed into E. coli (DH5alpha) using a standard heat shock protocol (Maniatis et al.). Transformed colonies were grown on LB media and selected by respective antibiotica (Km) for 16 h at 37° C. Positive clones were identified by control PCR reactions using a combination of a vector specific and the respective ORF-specific primers.

[0323] Plasmid preparation. Plasmid DNA was prepared from positive clones using standard protocols (Qiagen Hilden, Germany).

[0324] Transformation of Agrobacteria. Plasmids were transformed into Agrobacterium tumefaciens (GV3101 pMP90; Koncz and Schell, 1986, Mol. Gen. Genet. 204: 383-396) using heat shock or electroporation protocols. Transformed colonies were grown on YEP media and selected by respective antibiotics (Rif/Gent/Km) for 2 d at 28 C. These Agrobacterium cultures were used for the plant transformation.

[0325] Arabidopsis thaliana was grown and transformed according to standard conditions Bechtold 1993 (Bechtold, N., Ellis, J., Pelletier, G. 1993. In planta Agrobacterium mediated gene transfer by infiltration of Arabidopsis thaliana plants C.R. Acad. Sci. Paris. 316:1194-1199); Bent et al. 1994 (Bent, A., Kunkel, B. N., Dahlbeck, D., Brown, K. L., Schmidt, R., Giraudat, J., Leung, J., and Staskawicz, B. J. 1994; PPCS2 of Arabidopsis thaliana: A leucin-rich repeat class of plant disease resistant genes; Science 265: 1856-1860).

[0326] Transgenic A. thaliana plants were grown individually in pots containing a 4:1 (v/v) mixture of soil and quartz sand in a York growth chamber. Standard growth conditions were: photoperiod of 16 h light and 8 h dark, 20° C., 60% relative humidity, and a photon flux density of 150 μE. To induce germination, sown seeds were kept at 4° C., in the dark, for 3 days. Plants were watered daily until they were approximately 3 weeks old at which time drought was imposed by withholding water. Concurrently, the relative humidity was reduced in 10% increments every second day to 20%. After approximately 12 days of withholding water, most plants showed visual symptoms of injury, such as wilting and leaf browning, whereas tolerant plants were identified as being visually turgid and healthy green in color. Plants were scored for symptoms of drought injury in comparison to neighbouring plants for 3 days in succession.

[0327] Three successive experiments were conducted. In the first experiment, 10 independent T2 lines were sown for each gene being tested. The percentage of plants not showing visual symptoms of injury was determined. In the second experiment, the lines that had been scored as tolerant in the first experiment were put through a confirmation screen according to the same experimental procedures. In this experiment, plants of each tolerant line were grown and treated as before. In the third experiment, at least 7 replicates of the most tolerant line were grown and treated as before. The average and maximum number of days of drought survival, after wild-type control had visually died, were determined.

[0328] In the first experiment, after 12 days of drought, the control, non-transgenic Arabidopsis thaliana and most transgenic lines expressing other transgenes in the test showed extreme visual symptoms of stress including necrosis and cell death. Several plants expressing the genes retained viability as shown by their turgid appearance and maintenance of green color.

[0329] The second experiment compared a smaller number of independent transgenic lines for each gene but a greater number of progeny within each independent transformation event. This experiment confirmed the previous results. Those lines containing the specific SRP encoding yeast genes survived longer than the controls. The results are summmarised in table 3.

[0330] In a third experiment, some lines were tested with multiple replicates. The average number of days the plants of the major line survived longer than wild type was measured, i.e., the number ‘1’ means that, on average, the plants overexpressing this ORF, survived 1 day longer than wild-type. The value for WT in this column is ‘0’. The results are summmarised in table 4.

TABLE 3
Drought tolerance of transgenic Arabidopsis thaliana expressing
the various SRP encoding genes from Saccharomyces cerevisiae
or E. coli after imposition of drought stress on 3 week-old plants.
Drought tolerance is measured for the indicated number of
transgenic plants (Plants tested) as the average number of
days (Average days of survival after WT) that the transgenic plants
survived after the control (untransformed wild type) had died.

| | number of tested | number of tested | Average days of |
|---|---|---|---|
| GENE | plants per line | lines per ORF | survival after WT |
| b0025 | 19 | 2 | 0.6 |
| b0061 | 19 | 2 | 0.9 |
| b0141 | 28 | 3 | 0.5 |
| b0144 | 30 | 3 | 0.8 |
| b0148 | 29 | 3 | 0.4 |
| b0318 | 10 | 1 | 0.5 |
| b0328 | 20 | 2 | 0.4 |
| b0361 | 10 | 1 | 0.5 |
| b0723 | 29 | 3 | 0.6 |
| b0726 | 29 | 3 | 0.4 |
| b0880 | 29 | 3 | 0.4 |
| b1069 | 29 | 3 | 0.4 |
| b1080 | 20 | 2 | 0.9 |
| b1130 | 29 | 3 | 1.1 |
| b1221 | 25 | 3 | 0.4 |
| b1350 | 30 | 3 | 0.6 |
| b1392 | 19 | 2 | 0.4 |
| b1557 | 30 | 3 | 0.8 |
| b1650 | 10 | 1 | 0.7 |
| b1717 | 30 | 3 | 0.4 |
| b1779 | 30 | 3 | 1.0 |
| b2164 | 30 | 3 | 0.5 |
| b2194 | 30 | 3 | 0.3 |
| b2197 | 10 | 1 | 0.3 |
| b2231 | 30 | 3 | 0.9 |
| b2246 | 30 | 3 | 0.5 |
| b2287 | 10 | 1 | 0.4 |
| b2488 | 10 | 1 | 0.2 |
| b2699 | 28 | 3 | 0.5 |
| b2733 | 30 | 3 | 0.7 |
| b2886 | 29 | 3 | 0.3 |
| b2926 | 29 | 3 | 0.4 |
| b2980 | 20 | 2 | 0.7 |
| b3030 | 30 | 3 | 0.6 |
| b3066 | 30 | 3 | 0.3 |
| b3067 | 30 | 3 | 0.6 |
| b3604 | 20 | 3 | 0.7 |
| b3687 | 19 | 2 | 1.4 |
| b3811 | 30 | 3 | 0.4 |
| b4074 | 29 | 3 | 0.6 |
| b4090 | 10 | 1 | 1.5 |
| b4351 | 28 | 3 | 0.5 |
| YAL005C | 11 | 2 | 1.7 |
| YAL025C | 29 | 3 | 0.3 |
| YAL047C | 29 | 3 | 0.6 |
| YAR028W | 20 | 2 | 0.3 |
| YAR068W | 16 | 2 | 0.3 |
| YBL021C | 10 | 1 | 0.4 |
| YBR101C | 15 | 2 | 0.5 |
| YBR128C | 19 | 2 | 1.1 |
| YBR176W | 7 | 1 | 0.7 |
| YBR204C | 25 | 3 | 0.2 |
| YBR243C | 10 | 1 | 0.9 |
| YDL199C | 5 | 1 | 0.6 |
| YDL212W | 30 | 3 | 0.3 |
| YDL242W | 16 | 2 | 0.3 |
| YDL248W | 10 | 1 | 0.3 |
| YDR446W | 18 | 2 | 0.9 |
| YDR467C | 19 | 2 | 0.3 |
| YDR476C | 29 | 3 | 0.4 |
| YDR524C | 4 | 2 | 1.0 |
| YDR526C | 30 | 3 | 0.7 |
| YEL020W-A | 5 | 2 | 2.8 |
| YEL059W | 6 | 1 | 1.2 |
| YER075C | 27 | 3 | 0.6 |
| YER085C | 26 | 3 | 0.5 |
| YER148W | 31 | 4 | 0.5 |
| YER159C | 4 | 1 | 0.8 |
| YER185W | 27 | 2 | 0.7 |
| YFL029C | 10 | 1 | 0.7 |
| YFL038C | 30 | 3 | 0.3 |
| YGL028C | 29 | 3 | 1.0 |
| YGL186C | 10 | 1 | 0.2 |
| YGL196W | 10 | 1 | 0.3 |
| YGL217C | 10 | 1 | 1.3 |
| YGR006W | 7 | 1 | 0.4 |
| YGR070W | 20 | 2 | 0.3 |
| YGR111W | 20 | 2 | 0.4 |
| YGR182C | 9 | 1 | 0.2 |
| YHR005C-A | 30 | 3 | 0.3 |
| YHR169W | 18 | 2 | 0.8 |
| YHR203C | 23 | 3 | 0.4 |
| YIL012W | 20 | 3 | 0.6 |
| YIL046W | 22 | 3 | 0.7 |
| YIL059C | 17 | 2 | 1.9 |
| YIL096C | 3 | 1 | 1.3 |
| YIL100W | 28 | 4 | 1.2 |
| YIL128W | 27 | 3 | 0.7 |
| YIL166C | 37 | 4 | 0.4 |
| YIL172C | 20 | 2 | 0.9 |
| YJL021C | 25 | 3 | 0.4 |
| YJL038C | 30 | 3 | 0.2 |
| YJL151C | 27 | 3 | 0.5 |
| YJR034W | 28 | 3 | 0.4 |
| YJR078W | 17 | 2 | 0.2 |
| YJR153W | 18 | 3 | 0.8 |
| YKL026C | 16 | 2 | 0.3 |
| YKL047W | 40 | 5 | 0.3 |
| YKL075C | 10 | 2 | 0.9 |
| YKL081W | 13 | 2 | 0.4 |
| YKL096W-A | 24 | 3 | 0.3 |
| YLR104W | 35 | 4 | 0.9 |
| YLR128W | 27 | 3 | 0.6 |
| YLR354C | 25 | 3 | 1.0 |
| YLR406C | 18 | 3 | 0.4 |
| YLR414C | 23 | 3 | 0.5 |
| YML090W | 26 | 3 | 0.3 |
| YMR217W | 15 | 2 | 0.5 |
| YNL010W | 17 | 3 | 0.9 |
| YNL065W | 30 | 3 | 0.7 |
| YNL206C | 16 | 3 | 0.3 |
| YNL276C | 7 | 2 | 1.0 |
| YNL279W | 25 | 3 | 0.4 |
| YNR015W | 24 | 2 | 0.9 |
| YOL055C | 22 | 3 | 0.8 |
| YPL197C | 29 | 3 | 0.4 |
| YPL224C | 30 | 3 | 0.3 |
| YPR055W | 28 | 3 | 0.1 |

TABLE 4
Drought tolerance of transgenic Arabidopsis thaliana expressing
selected SRP encoding genes from Saccharomyces cerevisiae
or E. coli after imposition of drought stress on 3 week old plants
in a third experiment. Drought tolerance is measured for the
indicated number of transgenic plants (Plants tested) as the
average number of days (Average days of survival after WT)
that the transgenic plants survived after the control
(untransformed wild type) had died.

| | number of tested | number of tested | Average days of |
|---|---|---|---|
| GENE | plants per line | lines per ORF | survival after WT |
| b2699 | 59 | 12 | 2.6 |
| b2987 | 122 | 12 | 1.5 |
| b3358 | 56 | 5 | 2.8 |
| YAL005C | 36 | 8 | 1.6 |
| YBL100C | 45 | 9 | 2.0 |
| YBL109W | 44 | 7 | 1.4 |
| YBR004C | 27 | 9 | 1.5 |
| YBR204C | 38 | 8 | 1.7 |
| YDR524C | 6 | 3 | 1.8 |
| YER185W | 31 | 7 | 1.6 |
| YFL029C | 68 | 5 | 0.9 |
| YGR070W | 72 | 10 | 1.0 |
| YIL172C | 46 | 10 | 1.4 |
| YJL010C | 40 | 7 | 2.6 |
| YJL151C | 46 | 9 | 2.8 |
| YJR078W | 6 | 3 | 2.2 |
| YJR153W | 26 | 2 | 1.5 |
| YMR217W | 39 | 8 | 1.2 |
| YNR015W | 39 | 7 | 2.4 |
| YPL091W | 37 | 6 | 1.7 |
| YPL151C | 26 | 8 | 2.0 |
| YPR055W | 47 | 10 | 0.8 |

The application's sequence listing, which the Patent Office published only in electronic form, follows.

SEQUENCE LISTING (534 sequences)

SEQ ID NO: 1 - protein, 13 aa, Saccharomyces cerevisiae
  MOD_RES (2): Variable amino acid
  MOD_RES (4): Variable amino acid
  MOD_RES (5): Variable amino acid
  MOD_RES (8)..(10): Variable amino acid
LXVXXGDXXXGKT

SEQ ID NO: 2 - protein, 9 aa, Saccharomyces cerevisiae
  MOD_RES (2)..(4): Variable amino acid
  MOD_RES (6): Variable amino acid
  MOD_RES (7): Variable amino acid
FXXXYXXTV

SEQ ID NO: 3 - protein, 7 aa, Saccharomyces cerevisiae
WDTAGQE

SEQ ID NO: 4 - protein, 7 aa, Saccharomyces cerevisiae
  MOD_RES (5): Variable amino acid
VGTKXDL

SEQ ID NO: 5 - DNA, 942 bp, Escherichia coli
atgaagctgatacgcggcatacataatctcagccaggccccgcaagaagggtgtgtgctgactattggtaatttcgacggcgtgcatcgcggtcatcgcgcgctgttacagggcttgcaggaagaagggcgcaagcgcaacttaccggtgatggtgatgctttttgaacctcaaccactggaactgtttgctaccgataaagccccggcaagactgacccggctgcgggaaaaactgcgttaccttgcagagtgtggcgttgattacgtgctgtgcgtgcgtttcgacaggcgtttcgcggcgttaaccgcgcaaaatttcatcagcgatcttctggtgaagcatttgcgcgtaaaatttcttgccgtaggtgatgatttccgctttggcgctggtcgtgaaggcgatttcttgttattacagaaagctggcatggaatacggcttcgatatcaccagtacgcaaactttttgcgaaggtggcgtgcgcatcagcagcaccgccgtgcgtcaggcccttgcggatgacaatctggctctggcagagagtttactggggcacccgtttgccatctccgggcgtgtagtccacggtgatgaattagggcgcactataggtttcccgacggcgaatgtaccgctgcgccgtcaggtttccccggtgaaaggggtttatgcggtagaagtgctgggcctcggtgaaaagccgttacccggcgtggcaaacatcggaacacgcccaacggttgccggtattcgccagcagctggaagtgcatttgttagatgttgcaatggacctttacggtcgccatatacaagtagtgctgcgtaaaaaaatacgcaatgagcagcgatttgcgtcgctggacgaactgaaagcgcagattgcgcgtgatgaattaaccgcccgcgaattttttgggctaacaaaaccggcttaa

SEQ ID NO: 6 - DNA, 696 bp, Escherichia coli
atgttagaagatctcaaacgccaggtattagaagccaacctggcgctgccaaaacacaacctggtcacgctcacatggggcaacgtcagcgccgttgatcgcgagcgcggcgtctttgtgatcaaaccttccggcgtcgattacagcgtcatgaccgctgacgatatggtcgtggttagcatcgaaaccggtgaagtggttgaaggtacgaaaaagccctcctccgacacgccaactcaccggctgctctatcaggcattcccctccattggcggcattgtgcatacgcactcgcgccacgccaccatctgggcgcaggcgggtcagtcgattccagcaaccggcaccacccacgccgactatttctacggcaccattccctgcacccgcaaaatgaccgacgcagaaatcaacggcgaatatgagtgggaaaccggtaacgtcatcgtagaaacctttgaaaaacagggtatcgatgcagcgcaaatgcccggcgttctggtccattcccacggcccgtttgcatggggcaaaaatgccgaagatgcggtgcataacgccatcgtgctggaagaggtcgcttatatggggatattctgccgtcagttagcgccgcagttaccggatatgcagcaaacgctgctggataaacactatctgcgtaagcatggcgcgaaggcatattacgggcagtaa

SEQ ID NO: 7 - DNA, 585 bp, Escherichia coli
atgtctaaaaaattaggttttgccctgtctggtcttatgctggcgatggttgcaggtactgcttctgctgatatggacggcggtcagttaaatatcagtggtctggttgttgataacacctgtgaaacccgcgttgacggcggtaacaaggatggtctgatcctgctgcaaaccgcaaccgttggtgaaatcgatgctggcgtactgaatgacaccgttggcgctaaagctaaacctttcagcatcaccgttgactgcagcaaagcaaatccgaatccaggtagcacggctaaaatgaccttcggttctgttttctttggtaacagcaaagggactttgaacaacgacatgtctattaacaacccatctgacggcgttaatatcgctctacacaatattgatggttccactatcaaacaggttcaaattaacaaccctggcgatgtgtatactaaagccctggatgcaacgacaaaatctgctgtttatgattttaaagcgtcttacgttcgtgccgtcgcagaccaaacagcaactgctggttatgtaaaaactaacactgcatacaccattacttatcagtaa

SEQ ID NO: 8 - DNA, 927 bp, Escherichia coli
atgctcccgccttattttttgttcaaagagatgacagacacacagtatattggccgcttcgccccctctccttccggcgagcttcattttggctctctgatcgccgcgctcggcagctatttgcaggctcgcgcccggcaaggtcgctggctggtacgcatagaagatatcgacccgcctcgtgaagttcccggtgccgcagaaactatcctgcgccagctggaacattacggtctgcactgggacggcgatgttctctggcaatcgcaacgtcacgacgcctatcgtgaagcactcgcctggttacatgaacaaggactaagttattactgcacctgtacgcgtgcgcgtattcaaagcattggcggtatttacgacggtcattgccgggtgttgcatcatggaccagacaacgccgcagtgcgtatccgccagcagcatccggtcacgcaatttactgaccagctgcgcggcattattcacgccgacgaaaaactggcacgggaagattttatcattcatcgccgtgatgggttgttcgcctacaacctggctgttgtggttgatgatcatttccagggcgttacagaaatagtgcgtggggctgatctgattgaaccaacagtaaggcaaatctcgctgtaccagctttttggctggaaagtgccagattacattcatctgccgctggcgcttaatccacaaggcgctaaactttccaagcagaatcatgcgcctgcgttgccgaaaggcgatccacgcccggtactaatcgcggcacttcaatttctggggcagcaggcagaagcacactggcaggatttcagcgtcgagcaaatccttcagtcagccgtcaaaaactggcggcttaccgccgtgcccgagtcggcaattgtaaattcaacattctcaaatgcgtcatgctga

SEQ ID NO: 9 - DNA, 2475 bp, Escherichia coli
atgctacaatgtggcgcgaagaatgttaaccctctggagcgttttgtgtcgtcgttgcccgttgctgccgtcttacctgaattacttaccgctctcgattgtgcgccgcaggtattattaagtgcgccgaccggggccgggaaatcaacctggctgccgctgcaactgctggcgcatcccggcattaacgggaaaattatcctgctggagccgcgtcgtctggcggcgcgtaacgtcgcgcaacggctggcggagctgcttaacgaaaagccaggcgataccgttggctaccggatgcgtgcgcaaaactgcgtcgggccgaatacccgcctggaagtggttaccgaaggcgtgctgacgcgcatgatccagcgtgacccggaactgagcggtgttggactggtgatccttgatgaatttcatgagcgcagcttgcaggcggatttggcgttggcgctgttactcgatgtgcaacaaggtctgcgtgatgaccttaaactgctgattatgtcggctaccctggacaacgaccgcttgcagcaaatgctgccagaagcgcctgtcgtcatctcagaagggcgctcgtttccggttgaacgccgttatttaccgctgcccgcgcatcagcgttttgacgatgccgttgcggtagccaccgctgaaatgctgcgtcaggaaagcggatcattactgttatttttacctggcgtcggagaaattcagcgtgtgcaggaacaactggcttcgcgcatcggcagtgatgtattgctctgcccgctgtatggcgcgttgtcgctgaacgatcagcgaaaagcgatcctcccggcaccgcaagggatgcgcaaagtggtgctggcgaccaatattgctgaaaccagtttaaccattgaaggtattcgtctggtggtggattgtgcccaggagcgtgtggcgcgttttgatccgcgcacggggcttacgcgactgattactcaacgcgttagccaggcatccatgacgcagcgtgccgggcgcgccgggcgtctggagccgggtatcagcctgcatttaatcgccaaagaacaagcagaacgcgccgcggcgcaaagtgaaccggagatcttacaaagcgatctttccggtttgctgatggaattactgcaatggggatgcagcgatccggcgcagatgagctggctggatcaaccgccagtagtgaatctactggccgcgaaacgtctgttacaaatgctgggggcactggagggtgaacggcttagtgcgcaagggcaaaaaatggcagcgctgggtaacgatccgcgtttagcggcaatgctggttagcgcgaagaacgacgacgaagctgctaccgcggcaaaaattgccgccattctcgaagagccgccacggatgggcaatagtgacctgggcgtggcgttttcgcgcaatcaaccagcctggcagcaacgtagtcagcaactgttaaaacgcttaaacgtacgtggcggtgaggcagacagttcgcttatcgcgccgctacttgccggggcgtttgccgatcgcattgctcgtcgccgtgggcaagatggacgctatcaactggcaaacggcatgggagcgatgctcgatgccaacgacgcgctaagccgccacgaatggttgatcgcaccgttattattgcagggcagcgcctcgccggatgcgcggattttactggcgctgctggtcgatattgatgagttagtacaacgctgcccgcagctggtacagcagtctgacactgtggagtgggatgacgcgcaaggtacgctgaaagcctggcgtcggctacaaatcggtcagttgacggtgaaagtgcagccgctggcgaaaccgtcagaagacgagttgcatcaggcgatgcttaatggcatccgtgataaaggtttaagcgtgctcaactggacggcggaagcggaacagctacgcttgcgtttgttatgcgccgcaaagtggttgccggaatatgactggccagcggttgatgatgaaagtttattggcagcgctggaaacgtggctgctgccacatatgactggcgtacattcactacgcggcctgaaatcactcgacatttatcaggcactacgcggattacttgattggggaatgcagcaacgtctggatagtgaattgcctgcgcattacactgtgccgacgggaagccggatcgccattcgttatcatgaagataacccgcccgcgctggcggtgagaatgcaagagatgtttggcgaggccaccaatccgacgatcgcccaggggcgcgtgccgctggtgctggagttgctttcacctgcccaaaggccattacaaatcacacgagatttgagcgacttctggaaaggagcgtaccgtgaggtgcaaaaagagatgaaagggcgttatcccaaacatgtctggccggacgacccggcaaatactgcaccgacgcgacggacgaaaaagtattcgtaa

SEQ ID NO: 10 - DNA, 606 bp, Escherichia coli
atgagtataaaaaatctacctgccgactatttattggctgcacaacagggtgatatcgataaagtaaaaacctgccttgcgctgggtgtcgatattaatacctgcgatcgtcaggggaaaacggcaattacgctggcaagtttatatcagcaatatgcttgcgttcaggcattaattgatgccggagcggatattaataagcaagatcatacctgtttaaatccttttttaattagctgtctgaacgatgatttaacgctactacgaattattttaccggctaaacccgatcttaattgcgtaacccgttttggcggtgtcggcctgacgcctgcctgtgaaaaaggccatttaagtattgtaaaagagcttttggcgcatacggagattaacgttaaccagaccaaccatgtaggctggacgccgctactggaagcgattgtgcttaatgatggtggtattaaacagcaggcgattgtgcagttattgctggaacacggtgccagcccgcatctgaccgataaatatggcaaaacgccactggaactggcgcgggaacggggctttgaagagattgcgcagttactgattgccgcaggtgcataa

SEQ ID NO: 11 - DNA, 672 bp, Escherichia coli
atgatgcagttagttcacttatttatggatgaaatcactatggatcctttgcatgccgtttacctgaccgtaggactgttcgtgattactttttttaatccgggagccaatctctttgtggtagtacaaaccagcctggcttccggtcgacgcgcaggggtgctgaccgggctgggcgtggcgctgggcgatgcattttattccgggttgggtttgtttggtcttgcaacgctaattacgcagtgtgaggagattttttcgcttatcagaatcgtcggcggcgcttatctcttatggtttgcgtggtgcagcatgcgccgccagtcaacaccgcaaatgagcacactacaacaaccgattagcgccccctggtatgtcttttttcgccgcggattaattaccgatctctctaacccgcaaaccgttttattttttatcagtattttctcagtaacattaaatgccgaaacaccaacatgggcacgtttaatggcctgggcggggattgtgctcgcatcaattatctggcgagtttttcttagtcaggcgttttctttgcccgctgtgcgtcgtgcttatgggcgtatgcaacgcgttgccagtcgggttattggtgcaattattggtgtattcgcgctacgcctgatttacgaaggggtgacgcagcggtga

SEQ ID NO: 12 - DNA, 906 bp, Escherichia coli
gtggatagcgcacgcgcccttattgcccggggatggggagtaagcttagtcagccgttgtctccgggtgtcgcgtgcgcagttgcacgtcattctcagacgaaccgatgactggatggatggccgccgcagtcgtcacactgatgatacggatgtgcttctccgtatacaccatgttatcggagagctgccaacgtatggttatcgtcgggtatgggcgctgcttcgcagacaggcagaacttgatggtatgcctgcgatcaatgccaaacgtgtttaccggatcatgcgccagaatgcgctgttgcttgagcgaaaacctgctgtaccgccatcgaaacgggcacatacaggcagagtggccgtgaaagaaagcaatcagcgatggtgctctgacgggttcgagttctgctgtgataacggagagagactgcgtgtcacgttcgcgctggactgctgtgatcgtgaggcactgcactgggcggtcactaccggcggcttcaacagtgaaacagtacaggacgtcatgctgggagcggtggaacgccgcttcggcaacgatcttccgtcgtctccagtggagtggctgacggataatggttcatgctaccgggctaatgaaacacgccagttcgcccggatgttgggacttgaaccgaagaacacggcggtgcggagtccggagagtaacggaatagcagagagcttcgtgaaaacgataaagcgtgactacatcagtatcatgcccaaaccagacgggttaacggcagcaaagaaccttgcagaggcgttcgagcattataacgaatggcatccgcatagtgcgctgggttatcgctcgccacgggaatatctgcggcagcgggcttgtaatgggttaagtgataacagatgtctggaaatatag

SEQ ID NO: 13 - DNA, 1767 bp, Escherichia coli
atgaaattgccagtcagagaatttgatgcagttgtgattggtgccggtggcgcaggtatgcgcgcggcgctgcaaatttcccagagcggccagacctgtgcgctgctctctaaagtcttcccgacccgttcccataccgtttctgcgcaaggcggcattaccgttgcgctgggtaatacccatgaagataactgggaatggcatatgtacgacaccgtgaaagggtcggactatatcggtgaccaggacgcgattgaatatatgtgtaaaaccgggccggaagcgattctggaactcgaacacatgggcctgccgttctcgcgtctcgatgatggtcgtatctatcaacgtccgtttggcggtcagtcgaaaaacttcggcggcgagcaggcggcacgcactgcggcagcagctgaccgtaccggtcacgcactgttgcacacgctttatcagcagaacctgaaaaaccacaccaccattttctccgagtggtatgcgctggatctggtgaaaaaccaggatggcgcggtggtgggttgtaccgcactgtgcatcgaaaccggtgaagtggtttatttcaaagcccgcgctaccgtgctggcgactggcggagcagggcgtatttatcagtccaccaccaacgcccacattaacaccggcgacggtgtcggcatggctatccgtgccggcgtaccggtgcaggatatggaaatgtggcagttccacccgaccggcattgccggtgcgggcgtactggtcaccgaaggttgccgtggtgaaggcggttatctgctgaacaaacatggcgaacgttttatggagcgttatgcgccgaacgccaaagacctggcgggccgtgacgtggttgcgcgttccatcatgatcgaaatccgtgaaggtcgcggctgtgatggtccgtgggggccacacgcgaaactgaaactcgatcacctgggtaaagaagttctcgaatcccgtctgccgggtatcctggagctttcccgtaccttcgctcacgtcgatccggtgaaagagccgattccggttatcccaacctgtcactacatgatgggcggtattccgaccaaagttaccggtcaggcactgactgtgaatgagaaaggcgaagatgtggttgttccgggactgtttgccgttggtgaaatcgcttgtgtatcggtacacggcgctaaccgtctgggcggcaactcgctgctggacctggtggtctttggtcgcgcggcaggtctgcatctgcaagagtctatcgccgagcagggcgcactgcgcgatgccagcgagtctgatgttgaagcgtctctggatcgcctgaaccgctggaacaataatcgtaacggtgaagatccggtggcgatccgtaaagcgctgcaagaatgtatgcagcataacttctcggtcttccgtgaaggtgatgcgatggcgaaagggcttgagcagttgaaagtgatccgcgagcgtctgaaaaatgcccgtctggatgacacttccagcgagttcaacacccagcgcgttgagtgcctggaactggataacctgatggaaacggcgtatgcaacggctgtttctgccaacttccgtaccgaaagccgtggcgcgcatagccgcttcgacttcccggatcgtgatgatgaaaactggctgtgccactccctgtatctgccagagtcggaatccatgacgcgccgaagcgtcaacatggaaccgaaactgcgcccggcattcccgccgaagattcgtacttactaa

SEQ ID NO: 14 - DNA, 2802 bp, Escherichia coli
atgcagaacagcgctttgaaagcctggttggactcttcttacctctctggcgcaaaccagagctggatagaacagctctatgaagacttcttaaccgatcctgactcggttgacgctaactggcgttcgacgttccagcagttacctggtacgggagtcaaaccggatcaattccactctcaaacgcgtgaatatttccgccgcctggcgaaagacgcttcacgttactcttcaacgatctccgaccctgacaccaatgtgaagcaggttaaagtcctgcagctcattaacgcataccgcttccgtggtcaccagcatgcgaatctcgatccgctgggactgtggcagcaagataaagtggccgatctggatccgtctttccacgatctgaccgaagcagacttccaggagaccttcaacgtcggttcatttgccagcggcaaagaaaccatgaaactcggcgagctgctggaagccctcaagcaaacctactgcggcccgattggtgccgagtatatgcacattaccagcaccgaagaaaaacgctggatccaacagcgtatcgagtctggtcgcgcgactttcaatagcgaagagaaaaaacgcttcttaagcgaactgaccgccgctgaaggtcttgaacgttacctcggcgcaaaattccctggcgcaaaacgcttctcgctggaaggcggtgacgcgttaatcccgatgcttaaagagatgatccgccacgctggcaacagcggcacccgcgaagtggttctcgggatggcgcaccgtggtcgtctgaacgtgctggtgaacgtgctgggtaaaaaaccgcaagacttgttcgacgagttcgccggtaaacataaagaacacctcggcacgggtgacgtgaaataccacatgggcttctcgtctgacttccagaccgatggcggcctggtgcacctggcgctggcgtttaacccgtctcaccttgagattgtaagcccggtagttatcggttctgttcgtgcccgtctggacagacttgatgagccgagcagcaacaaagtgctgccaatcaccatccacggtgacgccgcagtgaccgggcagggcgtggttcaggaaaccctgaacatgtcgaaagcgcgtggttatgaagttggcggtacggtacgtatcgttatcaacaaccaggttggtttcaccacctctaatccgctggatgcccgttctacgccgtactgtactgatatcggtaagatggttcaggccccgattttccacgttaacgcggacgatccggaagccgttgcctttgtgacccgtctggcgctcgatttccgtaacacctttaaacgtgatgtcttcatcgacctggtgtgctaccgccgtcacggccacaacgaagccgacgagccgagcgcaacccagccgctgatgtatcagaaaatcaaaaaacatccgacaccgcgcaaaatctacgctgacaagctggagcaggaaaaagtggcgacgctggaagatgccaccgagatggttaacctgtaccgcgatgcgctggatgctggcgattgcgtagtggcagagtggcgtccgatgaacatgcactctttcacctggtcgccgtacctcaaccacgaatgggacgaagagtacccgaacaaagttgagatgaagcgcctgcaggagctggcgaaacgcatcagcacggtgccggaagcagttgaaatgcagtctcgcgttgccaagatttatggcgatcgccaggcgatggctgccggtgagaaactgttcgactggggcggtgcggaaaacctcgcttacgccacgctggttgatgaaggcattccggttcgcctgtcgggtgaagactccggtcgcggtaccttcttccaccgccacgcggtgatccacaaccagtctaacggttccacttacacgccgctgcaacatatccataacgggcagggcgcgttccgtgtctgggactccgtactgtctgaagaagcagtgctggcgtttgaatatggttatgccaccgcagaaccacgcactctgaccatctgggaagcgcagttcggtgacttcgccaacggtgcgcaggtggttatcgaccagttcatctcctctggcgaacagaaatggggccggatgtgtggtctggtgatgttgctgccgcacggttacgaagggcaggggccggagcactcctccgcgcgtctggaacgttatctgcaactttgtgctgagcaaaacatgcaggtttgcgtaccgtctaccccggcacaggtttaccacatgctgcgtcgtcaggcgctgcgcgggatgcgtcgtccgctggtcgtgatgtcgccgaaatccctgctgcgtcatccgctggcggtttccagcctcgaagaactggcgaacggcaccttcctgccagccatcggtgaaatcgacgagcttgatccgaagggcgtgaagcgcgtagtgatgtgttctggtaaggtttattacgacctgctggaacagcgtcgtaagaacaatcaacacgatgtcgccattgtgcgtatcgagcaactctacccgttcccgcataaagcgatgcaggaagtgttgcagcagtttgctcacgtcaaggattttgtctggtgccaggaagagccgctcaaccagggcgcatggtactgcagccagcatcatttccgtgaagtgattccgtttggggcttctctgcgttatgcaggccgcccggcctccgcctctccggcggtagggtatatgtccgttcaccagaaacagcaacaagatctggttaatgacgcgctgaacgtcgaataa

SEQ ID NO: 15 - DNA, 225 bp, Escherichia coli
atggaaaagggtactgttaagtggttcaacaatgccaaagggtttggtttcatctgccctgaaggcggcggcgaagatattttcgctcattattccaccattcagatggatggttacagaacgctaaaagctggacaatccgttcagtttgatgtccaccaggggccaaaaggcaatcacgccagtgttattgtgcccgtcgaagtagaagcggcagtcgcatag

SEQ ID NO: 16 - DNA, 1536 bp, Escherichia coli
atgaatttattaaaatcgctggccgccgtcagctcgatgaccatgttttcgcgtgtgcttggcttcgcacgagacgcaattgtcgccagaatctttggcgcagggatggcaaccgacgcctttttcgtcgcttttaaacttcctaacttgttacgccgtatctttgccgaaggggcattttcccaggcatttgtaccgattctggcggaatataaaagtaagcagggtgaagacgccacgcgggtctttgtctcttatgtttctggcctgctgacacttgcgctggcggttgtgacggtcgctggcatgctcgccgcaccgtgggtgatcatggtgaccgcgccaggcttcgctgacacagctgacaaatttgccctgaccagccagctactaaagattacctttccctatatcttgctgatctccctggcgtcgctggtgggagcgattctgaatacgtggaaccgcttctcgattccggcgtttgctccaacactgcttaacatcagcatgattggtttcgcgctgtttgccgcaccgtactttaacccaccggtgctggcgctggcgtgggctgttacggtcggcggcgtcctgcagctggtgtatcagctaccgcacctgaagaagatcggcatgctggtcctgccgcgcattaacttccacgatgccggagcaatgcgcgtggtgaaacagatgggaccggcgatccttggcgtctctgtgagccagatctccttaatcatcaacaccatttttgcctcgtttcttgcttccggttcggtgtcttggatgtattacgccgaccgcttaatggagtttccgtccggtgtgctgggcgtggcgcttggcaccattttgctgccgtcgctgtcgaaaagttttgccagtggcaatcatgatgaatacaaccgtttgatggactgggggttgcgtctttgtttcctgttggcgctgccgagtgcggttgcgttgggcattctttccggtccgttgaccgtttcgctgttccagtacggtaaatttaccgcgtttgatgcgctgatgacccagcgggcgttaattgcctactcggtgggtttgattggcctgattgtagtgaaagtgttggctcctggcttttattcccgccaggacattaaaacgccagtgaaaattgccatcgttacgctgattttaacgcaattgatgaacctggcgtttattggtccgttgaaacatgccgggctgtcactttctattggtctggcggcgtgtctgaatgcttcgctgctttactggcagttgcgtaagcagaaaatctttaccccgcaacccggctggatggcgtttctgttgcgtctggtggtggcggtactggtgatgtctggcgtgcttttaggtatgttacatatcatgccggagtggtcattgggtaccatgccctggcgtttactgcgtttaatggcggtcgtgctggcggggattgccgcgtacttcgctgcactggcggtactgggcttcaaagttaaagaatttgcccgccggacggtgtaa

SEQ ID NO: 17 - DNA, 1098 bp, Escherichia coli
gtgattaaatttctctctgcattaattcttctactggtcacgacggcggctcaggctgagcgtattcgcgatctcaccagtgttcagggggtaaggcaaaactcactgattggctatggtctggtggtggggctggatggcaccggtgaccagacaacccagacgccgtttaccacacaaacgcttaataacatgctctcacagctgggaattaccgttccgacgggcaccaatatgcagctaaaaaacgtcgctgcggtaatggtgacagcgtcacttcctccgtttggacgtcaggggcaaaccatcgatgtggtggtttcttccatgggaaatgccaaaagcttgcgtggaggtacgttgttgatgacaccgcttaagggcgttgacagtcaggtgtatgcgctggcgcagggcaatattctggttggcggcgcaggagcctccgctggcggtagcagtgttcaggttaaccaactgaacggtggacggatcaccaatggtgcggttattgaacgtgaattgcccagccagtttggcgtcgggaatacccttaatttgcaacttaacgacgaagatttcagcatggcgcagcaaatcgctgacaccatcaaccgcgtgcgtggatatggcagcgccaccgcgttagatgcgcggactattcaggtgcgcgtaccgagtggcaacagttcccaggtccgcttccttgccgatattcagaatatgcaggttaatgtcaccccgcaggacgctaaagtagtgattaactcgcgcaccggttcggtggtgatgaatcgcgaagtgaccctcgacagctgcgcggtagcgcaggggaatctctcagtaacagttaatcgtcaggccaatgtcagccagccagatacaccgtttggtggtggacagactgtggttactccacaaacgcagatcgatttacgccagagcggcggttcgctgcaaagcgtacgttccagcgccagcctcaataacgtggtgcgcgcgctcaatgcgctgggcgctacgccgatggatctgatgtccatactgcaatcaatgcaaagtgcgggatgtctgcgggcaaaactggaaatcatctga

SEQ ID NO: 18 - DNA, 672 bp, Escherichia coli
atgcgcgtactggttgttgaagacaatgcgttgttacgtcaccaccttaaagttcagattcaggatgctggtcatcaggtcgatgacgcagaagatgccaaagaagccgattattatctcaatgaacatataccggatattgcgattgtcgatctcggattgccagacgaggacggtctgtcactgattcgccgctggcgtagcaacgatgtttcactgccgattctggtattaaccgcccgtgaaagctggcaggacaaagtcgaagtattaagtgccggtgctgatgattatgtgactaaaccgtttcatattgaagaggtgatggcgcgaatgcaggcattaatgcggcgtaatagcggtctggcttcacaggtcatttcgctccccccgtttcaggttgatctctctcgccgtgaattatctattaatgacgaagtgatcaaactgaccgcgttcgaatacactattatggaaacgttgatacgcaataatggcaaagtggtcagcaaagattcgttaatgctccaactctatccggatgcggagctgcgggaaagccataccattgatgtactgatgggacgtctgcgcaaaaaaattcaggcacaatatccccaagaagtgattaccaccgttcgcggccagggctatctgttcgaattgcgctga

SEQ ID NO: 19 - DNA, 651 bp, Escherichia coli
atgagtaatcaggaaccggctactatcctgctgattgacgatcacccgatgctgcgaactggcgtaaaacagcttatcagtatggcaccagatatcaccgtggttggcgaagcgagtaatggcgaacagggtattgaactggcggagtctcttgatcccgatctgatcctgttagatctcaatatgcccggcatgaacggtctggaaacgctggataaactgcgcgaaaagtccctctcagggcgcattgtggtattcagcgtctctaaccatgaagaagatgtggtcaccgcactgaaacgcggcgcggatggctatctgttaaaagatatggaaccggaagatctgctgaaagcattgcatcaggcagctgctggcgaaatggtattaagcgaagcattaacgcctgttctggccgccagcttgcgcgctaaccgtgccactactgagcgcgatgttaaccagttaaccccacgcgagcgcgatattctcaagctgattgcccagggtttgccgaacaagatgattgcccgccgcctggatatcaccgaaagcacagtaaaagtgcacgtcaagcacatgctgaagaaaatgaagctcaagtctcgcgtggaagcagcggtatgggtgcatcaggagcgcattttctga

SEQ ID NO: 20 - DNA, 2601 bp, Escherichia coli
atgagcacaaaaccactcttcctgttacggaaagcgaaaaaatcatccggtgaacctgacgtcgtcctgtgggcaagcaacgattttgaatcgacctgtgccactctggactacctgatcgttaagtcaggtaaaaaactgagcagctattttaaagctgttgccacgaattttcctgtcgttaatgacctgcccgctgaaggtgagatcgattttacctggagtgaacgctatcaactcagcaaagactccatgacatgggaactaaaaccgggagcagcaccagacaacgctcactatcaaggcaataccaacgtcaacggcgaagacatgactgagattgaggagaatatgctactcccaatttctggccaggaactgcccattcgttggcttgctcaacacggcagcgaaaaaccggtaacgcacgtttcacgcgacggactccaggcattacacattgctcgggctgaagaactaccggctgttactgccctggctgtttcccacaaaaccagcctgctcgacccgctggaaattcgcgaactccacaaactggttcgtgacactgacaaagttttccctaatcctggtaattcaaacctgggactgataactgcttttttcgaagcatacctgaacgctgactacaccgatcgaggactgctgacaaaagagtggatgaagggtaatcgtgtttcacacatcactcgcacggcttccggtgctaatgctggcggcggaaacctcaccgatcgcggcgaaggtttcgtacacgatctgacgtcactggcgcgcgacgtagccactggcgtactggcccgttcaatggatctggacatctataaccttcatccggcacacgctaaacgcattgaggaaattatcgctgaaaataaaccgcccttttctgttttccgcgacaaattcatcaccatgcctggcgggctggattattcccgcgccatcgtggttgcgtccgtaaaagaagcaccaattgggatcgaggtcatccccgcgcacgtcactgaatatctgaacaaagtactgactgaaaccgatcatgccaaccctgatccggaaatcgtggatattgcctgcggtcgctcctctgccccgatgccgcagcgagtaacagaagaaggaaaacaggatgatgaagaaaaaccgcaaccatctggaacaacggcagttgaacagggagaggctgaaacaatggaaccggacgcaactgaacatcatcaggacacgcagccgctggatgctcagtcacaggtaaattctgttgatgcgaaatatcaggaactgcgggcagaactccatgaagcccggaaaaacattccatcaaaaaatcctgtcgatgacgataaattgcttgctgcatcacgtggtgaatttgttgacggaattagcgacccgaacgatccgaaatgggtaaaggggatccagactcgcgattgtgtgtaccagaaccagccagaaacggaaaaaaccagcccagatatgaatcaacctgagccagtagtgcaacaggaaccggaaatagcctgcaatgcctgcggccagactggcggggataactgccctgactgtggtgcggtgatgggcgacgcaacataccaggaaacattcgatgaagagagtcaggttgaagctaaggaaaatgatccggaggaaatggaaggcgctgaacatccgcacaatgagaatgctggcagcgatccgcatcgcgattgcagtgatgaaactggcgaagtcgcagatcccgtaatcgtagaagacatagagccaggtatttattacggaatttcgaatgagaattaccacgcgggtcccggtatcagtaagtctcagctcgatgacattgctgatactccggcactatatttgtggcgtaaaaatgcccccgtggacaccacaaagacaaaaacgctcgatttaggaactgctttccactgccgggtacttgaaccggaagaattcagtaaccgctttatcgtagcacctgaatttaaccgccgtacaaacgccggaaaagaagaagagaaagcgtttctgatggaatgcgcaagcacaggaaaaacggttatcactgcggaagaaggccggaaaattgaactcatgtatcaaagcgttatggctttgccgctggggcaatggcttgttgaaagcgccggacacgctgaatcatcaatttactgggaagatcctgaaacaggaattttgtgtcggtgccgtccggacaaaattatccctgaatttcactggatcatggacgtgaaaactacggcggatattcaacgattcaaaaccgcttattacgactaccgctatcacgttcaggatgcattctacagtgacggttatgaagcacagtttggagtgcagccaactttcgtttttctggttgccagcacaactattgaatgcggacgttatccggttgaaattttcatgatgggcgaagaagcaaaactggcaggtcaacaggaatatcaccgcaatctgcgaaccctgtctgactgcctgaataccgatgaatggccagctattaagacattatcactgccccgctgggctaaggaatatgcaaatgactaa

SEQ ID NO: 21 - DNA, 1071 bp, Escherichia coli
atgacaacgtttcattccttaacagtggcaaaagtcgagtcggaaacccgtgatgcggtgaccattacctttgcggtgccccagcctttgcaggaggcgtatcgctttcgccccggtcaacatttgaccttaaaagccagctttgatggtgaagaattacgccgttgttactccatttgccgcagctatctgcctggcgaaattagtgtggcggtgaaagccattgaaggcggacgtttctcccgctatgcccgcgaacacatccgccagggtatgacgctggaggtcatggtgccgcaggggcatttcggctatcagccgcaggccgaacgccaggggcgctatctggcaattgcagcaggatcaggtattacgccaatgctggcgattatcgccaccactttacaaaccgagcctgaaagtcagttcaccctgatctacggtaaccgtaccagccagagcatgatgtttcgccaggcactggcagacctgaaagacaaatatcctcagcgtttacagttgttgtgcattttcagtcaggaaaccctcgacagcgatctgcttcacgggcgtattgacggtgaaaaattacagtcacttggggcctcgctcattaattttcgtctttatgatgaggcatttatttgtggtccggcggcgatgatggatgacgcggaaaccgccttaaaagcactgggaatgccagataaaaccattcatctggagcggtttaatacgcctggcacgcgcgtcaaacgtagcgttaacgtgcaaagtgacggacaaaaagtgactgtacgtcaggatgggcgggatcgggaaatcgtgcttaatgccgacgatgaaagcattctcgatgcggcattgcgccagggggcggatctgccctatgcctgcaaaggcggcgtctgtgcgacctgcaaatgcaaagtgctgcgtggcaaagtggcgatggaaaccaattacagtctggaaccggatgaactggccgcaggttatgtgttgagttgccaggcactgccgctgaccagcgatgtggtggttgactttgacgcgaaggggatggcatga

SEQ ID NO: 22 - DNA, 216 bp, Escherichia coli
atgtcaaataaaatgactggtttagtaaaatggtttaacgctgataaaggtttcggctttatttctcctgttgatggtagtaaagatgtgtttgtgcatttttctgcgattcagaatgataattatcgaaccttatttgaaggtcaaaaggttaccttctctatagagagtggtgctaaaggtcctgcagcagcaaatgtcatcattactgattaa

SEQ ID NO: 23 - DNA, 1098 bp, Escherichia coli
atgtcatctgaaaaactgtattccccactgaaagtgggcgcgatcacggcggcaaaccgtatttttatggcaccgctgacgcgtctgcgcagtattgaaccgggtgacattcctaccccgttgatggcggaatactatcgccaacgtgccagtgccggtttgattattagtgaagccacgcaaatttctgcccaggcaaaaggatatgcaggtgcgcctggcatccatagtccggagcaaattgccgcatggaaaaaaatcaccgctggcgttcatgctgaaaatggtcatatggccgtgcagctgtggcacaccggacgcatttctcacgccagcctgcaacctggcggtcaggcaccggtagcgccttcagcacttagcgcgggaacacgtacttctctgcgcgatgaaaatggtcaggcgatccgtgttgaaacatccatgccgcgtgcgcttgaactggaagagattccaggtatcgtcaatgatttccgtcaggccattgctaacgcgcgtgaagccggttttgatctggtagagctccactctgctcacggttatttgctgcatcagttcctttctccttcttcaaaccatcgtaccgatcagtacggcggcagcgtggaaaatcgcgcacgtttggtactggaagtggtcgatgccgggattgaagaatggggtgccgatcgcattggcattcgcgtttcaccaatcggtactttccagaacacagataacggcccgaatgaagaagccgatgcactgtatctgattgaacaactgggtaaacgcggcattgcttatctgcatatgtcagaaccagattgggcggggggtgaaccgtatactgatgcgttccgcgaaaaagtacgcgcccgtttccacggtccgattatcggcgcaggtgcatacacagtagaaaaagctgaaacgctgatcggcaaagggttaattgatgcggtggcatttggtcgtgactggattgcgaacccggatctggtcgcccgcttgcagcgcaaagctgagcttaacccacagcgtgccgaaagtttctacggtggcggcgcggaaggctataccgattacccgacgttgtaa

SEQ ID NO: 24 - DNA, 198 bp, Escherichia coli
atgccaaaaattaagaccgtacgcggtgctgctaagcgcttcaaaaaaaccggtaaaggtggttttaagcacaagcacgctaacctgcgtcacattctgaccaaaaaagcgaccaaacgtaaacgtcacctgcgtccgaaagccatggtttccaaaggcgatctgggcctggtaatcgcgtgcctgccgtacgcataa

SEQ ID NO: 25 - DNA, 996 bp, Escherichia coli
atgactatcaaagtaggtatcaacggttttggccgtatcggtcgcattgttttccgtgctgctcagaaacgttctgacatcgagatcgttgcaatcaacgacctgttagacgctgattacatggcatacatgctgaaatatgactccactcacggccgtttcgacggtaccgttgaagtgaaagacggtcatctgatcgttaacggtaaaaaaatccgtgttaccgctgaacgtgatccggctaacctgaaatgggacgaagttggtgttgacgttgtcgctgaagcaactggtctgttcctgactgacgaaactgctcgtaaacacatcaccgctggtgcgaagaaagtggttatgactggtccgtctaaagacaacactccgatgttcgttaaaggcgctaacttcgacaaatatgctggccaggacatcgtttccaacgcttcctgcaccaccaactgcctggctccgctggctaaagttatcaacgataacttcggcatcatcgaaggtctgatgaccaccgttcacgctactaccgctactcagaaaaccgttgatggcccgtctcacaaagactggcgcggcggccgcggcgcttcccagaacatcatcccgtcctctaccggtgctgctaaagctgtaggtaaagtactgccagaactgaatggcaaactgactggtatggcgttccgcgttccgaccccgaacgtatctgtagttgacctgaccgttcgtctggaaaaagctgcaacttacgagcagatcaaagctgccgttaaagctgctgctgaaggcgaaatgaaaggcgttctgggctacaccgaagatgacgtagtatctaccgatttcaacggcgaagtttgcacttccgtgttcgatgctaaagctggtatcgctctgaacgacaacttcgtgaaactggtatcctggtacgacaacgaaaccggttactccaacaaagttctggacctgatcgctcacatctccaaataa

SEQ ID NO: 26 - DNA, 1251 bp, Escherichia coli
atggatataatgagaagtgttgtggggatggtggtgttactggcaatagcatttctgttgtcagtgaataaaaagagcatcagtttgcgcacggttggagccgcactgctgctgcaaatcgctattggtggcatcatgctctacttcccaccgggaaaatgggcagtagaacaggcggcattaggcgttcataaagtgatgtcttacagtgatgccggtagcgccttcatttttggttcgctggttgggccgaaaatggatgtcctgtttgacggtgcgggttttatcttcgcctttcgcgtacttccggcgattattttcgttactgcgctcatcagtctgctgtactacattggcgtgatggggctgctgattcgcatccttggcagcattttccagaaagccctcaacatcagcaaaatcgaatcttttgttgcggttactactattttcctcgggcaaaatgagatcccggcgatcgttaaaccgtttatcgatcgcatgaatcgcaacgagttgtttaccgcaatttgtagcgggatggcgtccattgctggttcgatgatgattggttatgccggaatgggcgtaccaattgactacctgttagcggcatcgctgatggcgatccctggcgggattttgtttgcacgtattcttagcccggcaaccgagccttcgcaggtcacatttgaaaatctgtcgttcagcgaaacgccgccaaaaagctttatcgaagcggcggcgagcggtgcgatgaccgggctaaaaatcgccgctggtgtggcgacggtggtaatggcgtttgtcgcaattattgcgctgatcaacggcattatcggcggaattggcggctggtttggtttcgccaatgcctctctggaaagtatttttggctatgtgctggcaccgctggcgtggatcatgggtgtggactggagtgatgccaatcttgcgggtagcctgattgggcagaaactggcgattaacgaattcgtcgcttacctgagtttctccccatacctgcaaacgggcggcacgctggaagtgaaaaccattgcgattatctcctttgcgctttgtggttttgctaactttggttctatcggtgttgtcgttggcgcattttcggctatttcgccaaaacgcgcgccggaaatcgcccagcttggtttacgggcgctggcagcagcaacgctttccaacctgatgagtgcgactattgccgggttctttattggtctggcgtaa

SEQ ID NO: 27 - DNA, 1053 bp, Escherichia coli
atgaggtttttattgggcgtgctgatgctgatgatctccggctcagcgctggcgaccatcgatgtgttgcagtttaaagatgaagcacaggaacaacagttccgtcagctcactgaagaactgcgctgcccgaaatgccagaacaacagcattgccgattccaactcgatgattgccaccgacctgcgtcagaaagtgtatgaactgatgcaggaaggtaaaagtaaaaaagagattgtcgattatatggtggcgcgttacggcaacttcgtcacttacgatccgccgttaacgccgctgaccgtgctgctgtgggtgctgccagtagtggctattggcattggcggttgggtcatatacgcccgctcgcggcgtcgggtacgcgtggtgccggaagcgtttcctgaacaaagcgtgccggaaggtaagcgtgccggatatgttgtttatctgccgggtattgtggtggcgttaattgtggctggcgtcagctactaccagactggcaattatcagcaggtgaaaatctggcagcaggccacggcacaggctccggcgttgctggacagggcgctggatccgaaagccgatccgctcaacgaagaagagatgtcgcgtcttgcgctggggatgcgtactcaactgcaaaaaaatccgggagatatagaaggctggattatgttgggccgcgttggcatggcgctgggtaacgccagtatcgccaccgatgcatacgccactgcgtatcgcctcgatccgaaaaacagtgatgctgcactgggatacgctgaagcgttgactcgttcatctgatcccaacgacaaccgcctcggcggtgaactgctacgtcagctggtgagaacggaccatagcaatatccgtgtgctaagcatgtatgcgtttaatgcctttgagcagcagcgatttggcgaagccgttgccgcgtgggagatgatgttgaaactcttacctgccaacgatactcgccgtgcggtgattgaacgtagtatcgcgcaggcgatgcaacatttgtcgccgcaggagagtaaataa

SEQ ID NO: 28 - DNA, 480 bp, Escherichia coli
atgaatattcgccgtaaaaaccgcttgtggattgcctgtgccgtgttggcagggctggcgctgactatcggtctggtgctatatgcgctgcgctcgaatatcgatctcttttatacgccgggggaaattctctacggcaagcgtgaaactcagcaaatgccggaagtcggtcagcgtctgcgcgttggcgggatggtgatgccgggtagtgtgcagcgcgatcccaattcgctgaaagtgaccttcaccatttacgatgctgaaggctcagtggatgtctcttacgaaggcattttgccggatctgttccgtgaagggcagggcgttgtggtgcagggcgaactggaaaaaggcaatcatatcctcgcgaaagaagtgctggcgaaacacgatgaaaactatacgccgccagaagttgagaaagcgatggaagctaaccaccgtcgcccggcgagtgtttataaggacccagcatcatga

SEQ ID NO: 29 - DNA, 2628 bp, Escherichia coli
atgagcgaccttgcgagagaaattacaccggtcaacattgaggaagagctgaagagctcctatctggattatgcgatgtcggtcattgttggccgtgcgctgccagatgtccgagatggcctgaagccggtacaccgtcgcgtactttacgccatgaacgtactaggcaatgactggaacaaagcctataaaaaatctgcccgtgtcgttggtgacgtaatcggtaaataccatccccatggtgactcggcggtctatgacacgatcgtccgcatggcgcagccattctcgctgcgttatatgctggtagacggtcagggtaacttcggttctatcgacggcgactctgcggcggcaatgcgttatacggaaatccgtctggcgaaaattgcccatgaactgatggccgatctcgaaaaagagacggtcgatttcgttgataactatgacggcacggaaaaaattccggacgtcatgccaaccaaaattcctaacctgctggtgaacggttcttccggtatcgccgtaggtatggcaaccaacatcccgccgcacaacctgacggaagtcatcaacggttgtctggcgtatattgatgatgaagacatcagcattgaagggctgatggaacacatcccggggccggacttcccgacggcggcaatcattaacggtcgtcgcggtattgaagaagcttaccgtaccggtcgcggcaaggtgtatatccgcgctcgcgcagaagtggaagttgacgccaaaaccggtcgtgaaaccattatcgtccacgaaattccgtatcaggtaaacaaagcgcgcctgatcgagaagattgcggaactggtaaaagaaaaacgcgtggaaggcatcagcgcgctgcgtgacgagtctgacaaagacggtatgcgcatcgtgattgaagtgaaacgcgatgcggtcggtgaagttgtgctcaacaacctctactcccagacccagttgcaggtttctttcggtatcaacatggtggcattgcaccatggtcagccgaagatcatgaacctgaaagacatcatcgcggcgtttgttcgtcaccgccgtgaagtggtgacccgtcgtactattttcgaactgcgtaaagctcgcgatcgtgctcatatccttgaagcattagccgtggcgctggcgaacatcgacccgatcatcgaactgatccgtcatgcgccgacgcctgcagaagcgaaaactgcgctggttgctaatccgtggcagctgggcaacgttgccgcgatgctcgaacgtgctggcgacgatgctgcgcgtccggaatggctggagccagagttcggcgtgcgtgatggtctgtactacctgaccgaacagcaagctcaggcgattctggatctgcgtttgcagaaactgaccggtcttgagcacgaaaaactgctcgacgaatacaaagagctgctggatcagatcgcggaactgttgcgtattcttggtagcgccgatcgtctgatggaagtgatccgtgaagagctggagctggttcgtgaacagttcggtgacaaacgtcgtactgaaatcaccgccaacagcgcagacatcaacctggaagatctgatcacccaggaagatgtggtcgtgacgctctctcaccagggctacgttaagtatcagccgctttctgaatacgaagcgcagcgtcgtggcgggaaaggtaaatctgccgcacgtattaaagaagaagactttatcgaccgactgctggtggcgaacactcacgaccatattctgtgcttctccagccgtggtcgcgtctattcgatgaaagtttatcagttgccggaagccactcgtggcgcgcgcggtcgtccgatcgtcaacctgctgccgctggagcaggacgaacgtatcactgcgatcctgccagtgaccgagtttgaagaaggcgtgaaagtcttcatggcgaccgctaacggtaccgtgaagaaaactgtcctcaccgagttcaaccgtctgcgtaccgccggtaaagtggcgatcaaactggttgacggcgatgagctgatcggcgttgacctgaccagcggcgaagacgaagtaatgctgttctccgctgaaggtaaagtggtgcgctttaaagagtcttctgtccgtgcgatgggctgcaacaccaccggtgttcgcggtattcgcttaggtgaaggcgataaagtcgtctctctgatcgtgcctcgtggcgatggcgcaatcctcaccgcaacgcaaaacggttacggtaaacgtaccgcagtggcggaatacccaaccaagtcgcgtgcgacgaaaggggttatctccatcaaggttaccgaacgtaacggtttagttgttggcgcggtacaggtagatgactgcgaccagatcatgatgatcaccgatgccggtacgctggtacgtactcgcgtttcggaaatcagcatcgtgggccgtaacacccagggcgtgatcctcatccgtactgcggaagatgaaaacgtagtgggtctgcaacgtgttgctgaaccggttgacgaggaagatctggataccatcgacggcagtgccgcggaaggggacgatgaaatcgctccggaagtggacgttgacgacgagccagaagaagaataa

SEQ ID NO: 30 - DNA, 1329 bp, Escherichia coli
gtgacaacggtaacgcccacatattctaaggagctttttatgagcaccgctttgcttgacgccgtggtgaagaaaaaccgtgtgcgtttaattccgtttatgttggcgctgtatgtgctggcgtttctcgaccgttcgaatatcggttttgccaaacagacctaccagattgataccgggttgagtaatgaagcttatgcgctgggagcaggcattttctttgtggtatatgcgtttctgggtgttccggcgaatcttttgatgcgcaaactgggggccagaacctggattggtacgacaacactgctgtggggatttctttcggcagccatggcatgggccgatactgaagcgaaatttctgatagttcgcactctgcttcgtgctgcggaggccggatttttccctggtatgatttatctcacctcgcaatggtttccgcagcgtaatcgcgccagcattatggggctgttctatatgggcgcaccgctggcgttaacactgggatcaccgctttccggcgcgctgttggagatgcatggatttatggggcatcccggctggttctggatgtttgtgattgaaggattgttggcagtcggtgctggggtattcacattcttttggcttgatgacacaccggagcaggcacgttttctgagtaaacaagaaaaaacgttgcttatcaatcaactggcaagtgaagaacaacagaaagtgacttctcggctgagcgatgcgctgcgtaatggccgagtctggcaactagcgattatctacctgaccattcaggtggcggtttacggattaattttcttcctgccgacccaggttgcggcattgctgggaacaaaagtgggctttacagcgtcggtggtcaccgccattccgtgggttgcggccttgtttgggacctggcttattccgcgctattccgataaaaccggcgaacggcgtaatgtcgcagcgctgacattactggcggcgggcattggtattggtctgtccgggctgctttctccagtaatggcgatcgtagcgctgtgtgttgcagctatcgggtttattgccgtgcagccagtgttctggacgatgccgacacaactgctttccggtacggcgctggctgcgggaattggttttgtaaacctgtttggtgcagtgggcgggtttattgccccgatcctgcgcgtgaaagcagaaacgttatttgccagcgatgcggcgggattactgacgctggcagcggtggcggtcatcggttcgctgattattttcactctgcgtgtaaatcgcactgttgcgcagaccgacgtggcacatcattaa

SEQ ID NO: 31 - DNA, 663 bp, Escherichia coli
atggattatacgctcacccgcatagatcccaacggtgagaacgaccgttaccccctgcaaaagcaggagatcgtaaccgaccctctggagcaagaagttaacaaaaacgtgtttatgggcaagctcaatgacatggttaactggggtcgtaaaaactcaatttggccgtataacttcggtctttcctgctgttacgttgagatggtgacttcgtttaccgcggtgcatgacgtggcgcgttttggcgcagaagtattgcgtgcttcgccgcgtcaggctgacctgatggtggttgcaggaacctgctttaccaaaatggcaccggttattcagcgtctgtatgaccagatgctggaaccaaaatgggttatctcaatgggtgcctgtgccaactctggtggtatgtacgatatttattccgttgtgcagggcgtcgataaattcatcccggttgatgtgtatatcccgggctgcccgccgcgtcctgaagcgtacatgcaggcactgatgctgttgcaggaatctatcggcaaagaacgtcgtccgctctcctgggtggttggcgatcagggcgtttatcgcgccaatatgcaatcagagcgcgaacgcaagcgcggtgaacgcattgccgtaactaacctgcgtacacctgacgagatttaa

SEQ ID NO: 32 - DNA, 546 bp, Escherichia coli
atgctgaagttactgaaaactattatgcgcgccggaaccgcgacggtgaaatatcccttcgcgccactggaggtcagccctggctttcgcggaaaaccggacctgatgcccagccaatgtattgcctgcggtgcctgcgcctgtgcttgtccggcaaatgcgctgactatccagaccgacgaccagcaaaattcgcgcacctggcagctctatctggggcgttgtatttactgcggacgttgtgaagaagtgtgcccgaccagagccatccagcttaccaataactttgaactgaccgtcaccaataaagccgatctctatacccgcgcgacgttccatctacaacgttgcagccgttgcgaacgcccgtttgccccgcaaaaaaccatcgcactggctgctgaattgttagcacagcaacaaaatgcgccacaaaaccgcgaaatgttgtgggcgcaagcgagcgtctgcccggaatgcaaacaacgcgcgacgctgatcaacgacgatacagatgtactgctggtggctaaggagcagctatga

SEQ ID NO: 33 - DNA, 1062 bp, Escherichia coli
atggctatcgacgaaaacaaacagaaagcgttggcggcagcactgggccagattgagaaacaatttggtaaaggctccatcatgcgcctgggtgaagaccgttccatggatgtggaaaccatctctaccggttcgctttcactggatatcgcgcttggggcaggtggtctgccgatgggccgtatcgtcgaaatctacggaccggaatcttccggtaaaaccacgctgacgctgcaggtgatcgccgcagcgcagcgtgaaggtaaaacctgtgcgtttatcgatgctgaacacgcgctggacccaatctacgcacgtaaactgggcgtcgatatcgacaacctgctgtgctcccagccggacaccggcgagcaggcactggaaatctgtgacgccctggcgcgttctggcgcagtagacgttatcgtcgttgactccgtggcggcactgacgccgaaagcggaaatcgaaggcgaaatcggcgactctcacatgggccttgcggcacgtatgatgagccaggcgatgcgtaagctggcgggtaacctgaagcagtccaacacgctgctgatcttcatcaaccagatccgtatgaaaattggtgtgatgttcggtaacccggaaaccactaccggtggtaacgcgctgaaattctacgcctctgttcgtctcgacatccgtcgtatcggcgcggtgaaagagggcgaaaacgtggtgggtagcgaaacccgcgtgaaagtggtgaagaacaaaatcgctgcgccgtttaaacaggctgaattccagatcctctacggcgaaggtatcaacttctacggcgaactggttgacctgggcgtaaaagagaagctgatcgagaaagcaggcgcgtggtacagctacaaaggtgagaagatcggtcagggtaaagcgaatgcgactgcctggctgaaagataacccggaaaccgcgaaagagatcgagaagaaagtacgtgagttgctgctgagcaacccgaactcaacgccggatttctctgtagatgatagcgaaggcgtagcagaaactaacgaagatttttaa

SEQ ID NO: 34 - DNA, 2562 bp, Escherichia coli
atgagtgcaatagaaaatttcgacgcccatacgcccatgatgcagcagtatctcaggctgaaagcccagcatcccgagatcctgctgttttaccggatgggtgatttttatgaactgttttatgacgacgcaaaacgcgcgtcgcaactgctggatatttcactgaccaaacgcggtgcttcggcgggagagccgatcccgatggcggggattccctaccatgcggtggaaaactatctcgccaaactggtgaatcagggagagtccgttgccatctgcgaacaaattggcgatccggcgaccagcaaaggtccggttgagcgcaaagttgtgcgtatcgttacgccaggcaccatcagcgatgaagccctgttgcaggagcgtcaggacaacctgctggcggctatctggcaggacagcaaaggtttcggctacgcgacgctggatatcagttccgggcgttttcgcctgagcgaaccggctgaccgcgaaacgatggcggcagaactgcaacgcactaatcctgcggaactgctgtatgcagaagattttgctgaaatgtcgttaattgaaggccgtcgcggcctgcgccgtcgcccgctgtgggagtttgaaatcgacaccgcgcgccagcagttgaatctgcaatttgggacccgcgatctggtcggttttggcgtcgagaacgcgccgcgcggactttgtgctgccggttgtctgttgcagtatgcgaaagatacccaacgtacgactctgccgcatattcgttccatcaccatggaacgtgagcaggacagcatcattatggatgccgcgacgcgtcgtaatctggaaatcacccagaacctggcgggtggtgcggaaaatacgctggcttctgtgctcgactgcaccgtcacgccgatgggcagccgtatgctgaaacgctggctgcatatgccagtgcgcgatacccgcgtgttgcttgagcgccagcaaactattggcgcattgcaggatttcaccgccgggctacagccggtactgcgtcaggtcggcgacctggaacgtattctggcacgtctggctttacgaactgctcgcccacgcgatctggcccgtatgcgccacgctttccagcaactgccggagctgcgtgcgcagttagaaactgtcgatagtgcaccggtacaggcgctacgtgagaagatgggcgagtttgccgagctgcgcgatctgctggagcgagcaatcatcgacacaccgccggtgctggtacgcgacggtggtgttatcgcatcgggctataacgaagagctggatgagtggcgcgcgctggctgacggcgcgaccgattatctggagcgtctggaagtccgcgagcgtgaacgtaccggcctggacacgctgaaagttggctttaatgcggtgcacggctactacattcaaatcagccgtgggcaaagccatctggcacccatcaactacatgcgtcgccagacgctgaaaaacgccgagcgctacatcattccagagctaaaagagtacgaagataaagttctcacctcaaaaggcaaagcactggcactggaaaaacagctttatgaagagctgttcgacctgctgttgccgcatctggaagcgttgcaacagagcgcgagcgcgctggcggaactcgacgtgctggttaacctggcggaacgggcctataccctgaactacacctgcccgaccttcattgataaaccgggcattcgcattaccgaaggtcgccatccggtagttgaacaagtactgaatgagccatttatcgccaacccgctgaatctgtcgccgcagcgccgcatgttgatcatcaccggtccgaacatgggcggtaaaagtacctatatgcgccagaccgcactgattgcgctgatggcctacatcggcagctatgtaccggcacaaaaagtcgagattggacctatcgatcgcatctttacccgcgtaggcgcggcagatgacctggcgtccgggcgctcaacctttatggtggagatgactgaaaccgccaatattttacataacgccaccgaatacagtctggtgttaatggatgagatcgggcgtggaacgtccacctacgatggtctgtcgctggcgtgggcgtgcgcggaaaatctggcgaataagattaaggcattgacgttatttgctacccactatttcgagctgacccagttaccggagaaaatggaaggcgtcgctaacgtgcatctcgatgcactggagcacggcgacaccattgcctttatgcacagcgtgcaggatggcgcggcgagcaaaagctacggcctggcggttgcagctctggcaggcgtgccaaaagaggttattaagcgcgcacggcaaaagctgcgtgagctggaaagcatttcgccgaacgccgccgctacgcaagtggatggtacgcaaatgtctttgctgtcagtaccagaagaaacttcgcctgcggtcgaagctctggaaaatcttgatccggattcactcaccccgcgtcaggcgctggagtggatttatcgcttgaagagcctggtgtaa

SEQ ID NO: 35 - DNA, 492 bp, Escherichia coli
gtgatgaaatcgttaattatcgttaatccggctgactgtattggctgccgtacttgtgaagtagcctgtgtggtcgctcacccttcagaacaggagttgaatgccgatgtctttttaccccggctgaaggtacagcgactggacagcatcagtgcgccggtgatgtgccatcagtgtgaaaacgccccttgtgttggcgcttgccccgtgggggcgctgacgatgggcgagcaggtggtgcagaccaattctgcccgttgtattggctgtcagagttgcgtcagtgcgtgcccgtttggaatgatcaccattcagtcgttgccgggggatacccgacaacaaattgtgaaatgcgatctctgtgaacagcgggaagaggggccagcctgcgttgaatcttgcccaacacaggcgctgcagttgcttactgaaagagaactcaggcgagtccgccagcagcgtattgttgccagcggtgagaatcctctctga

SEQ ID NO: 36 - DNA, 1164 bp, Escherichia coli
atgtctgtaattaagatgaccgatctggatcttgctgggaaacgtgtatttatccgtgcggatctgaacgtaccagtaaaagacgggaaagtaaccagcgacgcgcgtatccgtgcttctctgccgaccatcgaactggccctgaaacaaggcgcaaaagtgatggtaacttcccacctgggtcgtcctaccgaaggcgagtacaacgaagaattctctctgctgccggttgttaactacctgaaagacaaactgtctaacccggttcgtctggttaaagattacctcgacggcgttgacgttgctgaaggtgaactggttgttctggaaaacgttcgcttcaacaaaggcgagaagaaagacgacgaaaccctgtccaaaaaatacgctgcactgtgtgacgtgttcgtaatggacgcattcggtactgctcaccgcgcgcaggcttctactcacggtatcggtaaattcgctgacgttgcgtgcgcaggcccgctgctggcagctgaactggacgcgctgggtaaagcactgaaagaacctgctcgcccgatggtggctatcgttggtggttctaaagtatctaccaaactgaccgttctggactccctgtctaaaatcgctgaccagctgattgttggtggtggtatcgctaacacctttatcgcggcacaaggccacgatgtgggtaaatccctgtacgaagctgacctggttgacgaagctaaacgtctgctgaccacctgcaacatcccggttccgtctgatgttcgcgtagcaaccgagttctctgaaactgcaccggctaccctgaaatctgttaacgatgtgaaagctgacgagcagatcctggatatcggtgatgcttccgctcaggaactggctgaaatcctgaagaatgcgaaaaccattctgtggaacggtccggttggcgtgttcgaattcccgaacttccgcaaaggtactgaaatcgtggctaacgctatcgcagacagcgaagcgttctccatcgctggcggcggcgacactctggcagcaatcgacctgttcggcattgctgacaaaatctcctacatctccactggcggcggcgcattcctcgaattcgtggaaggtaaagtactgcctgcagtagcgatgctcgaagagcgcgctaagaagtaa

SEQ ID NO: 37 - DNA, 765 bp, Escherichia coli
atgaaagatgaacgtcgccctatttgcgaagtggttgcagagagtatcgaacggttaattatcgacggcgtactgaaggtcggtcagccgcttccctcggaacgtcgactgtgtgaaaagctcggcttctcacgctccgcactgcgtgaagggctgaccgtgctgcgcgggcgcgggattattgaaacggcgcagggtcgcgattctcgtgtcgcacggcttaatcgggtgcaggacaccagcccgctgatccatctgttcagtacgcagccgcgaacgctgtacgatctgctcgacgttcgcgcattactggagggcgaatcggcaaggctggcggcaacgctgggaacgcaggctgattttgttgtgataacccgctgttatgaaaaaatgctcgccgccagtgagaacaacaaagagatttcgctgatcgaacatgcgcagttggatcacgctttccatctcgccatttgtcaggcttctcacaatcaggtgctggtgtttacgctgcaatcattgaccgatctgatgtttaattcagtgtttgccagcgtaaataatctctaccatcgaccacagcaaaaaaagcagatcgatcgccagcatgcgcggatctacaacgcggtgttgcagcggctgccgcacgtcgcccagcgcgcagcacgcgatcatgtgcggaccgtgaaaaagaatctccacgatatcgagctggaaggccaccatttgattcgctcggcggtgccgctggagatgaacctgagttag

SEQ ID NO: 38 - DNA, 1500 bp, Escherichia coli
atgctaaatttatttgttggccttgatatatacacagggcttttgttattgcttgctctggcatttgtgttgttctacgaagcaatcaatggttttcatgacacggcgaatgcggtggcagccgttatttatactcgtgccatgcaaccacaacttgctgtggtgatggcggcattttttaacttttttggcgtgttattgggcggacttagcgttgcctatgccattgtccatatgttgccaaccgatttgttgctgaatatggggtcaacccacggcctggcgatggtcttttccatgctgctggcggcgattatctggaacctgggaacgtggttcttcggtttaccggcctccagttcgcacaccttgattggtgcgattatcggcatcggtttaaccaacgcgctgttaaccggctcatcggtgatggatgcgttaaacctgcgtgaagtgaccaaaattttctcctcgctgattgtttcccctatcgtcggcctggtcattgcgggaggcctgatattcctgctgcgacgctactggagcgggacgaaaaagcgtgaccgtattcaccgcattccggaagatcgcaaaaagaaaaaaggcaaacgtaaaccgccattctggacgcgtattgcgctgattgtttccgctgcgggcgtggcgttttcgcacggcgcgaacgacggacaaaaagggatcggcctggtaatgctggtactggtggggattgcccctgctggcttcgtcgtcaatatgaatgcgtccggctatgaaattacccgtacccgcgatgccgttaccaacttcgaacactacctgcaacagcatcctgaactgccgcagaagttgattgcgatggaacctccattgcctgcagcatcgactgatggcacgcaagtaacagagtttcactgtcatccggcaaatacctttgatgctattgcgcgcgttaaaacgatgctgccaggcaatatggaaagttacgagccgttaagcgtgagtcagcgcagccagctgcgccgcattatgctgtgcatctctgatacctccgcgaagctagcgaaactgccaggcgtcagtaaagaagaccagaacctgctgaaaaaacttcgcagcgatatgttaagcaccattgagtacgctccggtgtggatcatcatggcggtagcactggcgctcggcattggcaccatgattggctggcgtcgtgtagcgatgaccatcggtgagaagattggtaagcgcggcatgacgtatgcgcaaggcatggcggcacaaatgacggcggcagtgtctatcggtcttgccagttatattgggatgcccgtctccacaacacacgtcctctcgtctgcagttgcagggacgatggtggtggacggcggtgggttacagcgtaaaacggtaaccagcatcctgatggcgtgggtatttactttaccggcggcaatttttctttctggtgggctgtactggatagcattgcagttgatttaa

SEQ ID NO: 39 - DNA, 1893 bp, Escherichia coli
atgacgcaaacttataacgctgatgccattgaggtactcaccgggcttgagccggttcgccgccgtccggggatgtataccgataccactcgccctaaccatttggggcaagaagtcattgataacagtgtggatgaagcactggcgggtcacgcaaaacgcgtggacgttattttacatgctgaccagtcgttagaagttattgacgatgggcgcgggatgccggtggatattcacccggaagagggtgtaccggcggttgaactgattctttgccgtctgcatgcaggcggtaaattctctaacaaaaattaccagttctctggcggcctgcatggcgtggggatttcggtggttaacgccctgtcgaagcgcgtagaagttaacgtgcgccgcgatggtcaggtttataacatcgcctttgaaaatggcgaaaaggtgcaggatttacaggttgtcggcacttgcggtaaacgcaatactggtaccagtgtgcacttctggccggatgaaaccttctttgacagcccgcgattttctgtttcacgcctgacgcatgtgctgaaagccaaagcggtattgtgccctggcgttgagatcacttttaaagatgagatcaacaataccgaacaacgctggtgctatcaggacggtctgaatgattacctggcggaagcggtaaatggtctgccgacgctgccggaaaaaccgtttatcggtaatttcgctggtgatactgaagctgtggactgggcgctactgtggctgccggaaggcggtgaactgctgaccgaaagctacgtcaaccttatcccaacgatgcagggcggtacccatgttaatggtctgcgtcagggcctgttggacgcgatgcgtgagttctgtgaataccgcaatattctgccgcgcggtgtaaagctgtcggcggaagatatctgggatcgctgcgcctatgtgctgtcagtaaaaatgcaggatccgcagtttgccgggcagacgaaagagcgtctctcttcgcgtcaatgcgcggcattcgtttctggcgtggtgaaagatgcctttatcctgtggctgaaccagaacgttcaggcggctgaactgctggcggagatggcgatttccagcgcccagcgccgtatgcgtgcggccaaaaaagtggtgcgtaaaaagctgaccagcggcccggcgttgcctggcaaactggctgattgtaccgcgcaggaccttaaccgtaccgagctgttccttgtggaaggtgactccgcaggcggatctgccaagcaggcgcgcgatcgcgaatatcaggcgatcatgccactgaaaggtaagatccttaacacctgggaagtctcttccgacgaagtgctggcttcgcaggaagtgcacgatatttcggtagcgatcggtatcgatcctgacagcgacgatctgagccagcttcgttatggcaaaatctgtatcctcgcggatgcggactctgatggtctgcacattgccacgctgctctgcgctttgttcgtaaaacatttccgcgcgttggtgaaacacggtcacgtttacgtcgcactgccaccgctctaccgtattgatctcgggaaagaggtttattacgcgctgacggaagaagagaaagagggcgtacttgagcaattaaaacgcaagaaaggcaagccgaacgtccagcgttttaaaggtctgggggaaatgaacccgatgcaattgcgcgaaaccacgcttgatccgaacactcgccgtctggtgcagttgactatcgatgatgaagacgatcagcgtactgacgcgatgatggatatgctgctggcgaagaaacgctcggaagatcgccgcaactggttgcaagagaaaggcgacatggcggagattgaggtttaa

SEQ ID NO: 40 - DNA, 1746 bp, Escherichia coli
atggctggacgaatcccacgcgtattcattaatgatctgctggcacgcactgacatcgtcgatctgatcgatgcccgtgtgaagctgaaaaagcagggcaagaatttccacgcgtgttgtccattccacaacgagaaaaccccgtccttcaccgttaacggtgagaaacagttttaccactgctttggatgtggcgcgcacggcaacgcgatcgacttcctgatgaactacgacaagctcgagttcgtcgaaacggtcgaagagctggcagcaatgcacaatcttgaagtgccatttgaagcaggcagcggccccagccagatcgagcgccatcagaggcaaacgctttatcagttgatggacggtctgaatacgttttaccaacaatctttacaacaacctgttgccacgtctgcgcgccagtatctggaaaaacgcggattaagccacgaggttatcgctcgctttgcgattggttttgcgccccccggctgggacaacgtcctgaagcggtttggcggcaatccagaaaatcgccagtcattgattgatgcggggatgttggtcactaacgatcagggacgcagttacgatcgtttccgcgagcgggtgatgttccccattcgcgataaacgcggtcgggtgattggttttggcgggcgcgtgctgggcaacgatacccccaaatacctgaactcgccggaaacagacattttccataaaggccgccagctttacggtctttatgaagcgcagcaggataacgctgaacccaatcgtctgcttgtggtcgaaggctatatggacgtggtggcgctggcgcaatacggcattaattacgccgttgcgtcgttaggtacgtcaaccaccgccgatcacatacaactgttgttccgcgcgaccaacaatgtcatttgctgttatgacggcgaccgtgcaggccgcgatgccgcctggcgagcgctggaaacggcgctgccttacatgacagacggccgtcagctacgctttatgtttttgcctgatggcgaagaccctgacacgctagtacgaaaagaaggtaaagaagcgtttgaagcgcggatggagcaggcgatgccactctccgcatttctgtttaacagtctgatgccgcaagttgatctgagtacccctgacgggcgcgcacgtttgagtacgctggcactaccattgatatcgcaagtgccgggcgaaacgctgcgaatatatcttcgtcaggaattaggcaacaaattaggcatacttgatgacagccagcttgaacgattaatgccaaaagcggcagagagcggcgtttctcgccctgttccgcagctaaaacgcacgaccatgcgtatacttatagggttgctggtgcaaaatccagaattagcgacgttggtcccgccgcttgagaatctggatgaaaataagctccctggacttggcttattcagagaactggtcaacacttgtctctcccagccaggtctgaccaccgggcaacttttagagcactatcgtggtacaaataatgctgccacccttgaaaaactgtcgatgtgggacgatatagcagataagaatattgctgagcaaaccttcaccgactcactcaaccatatgtttgattcgctgcttgaactgcgccaggaagagttaatcgctcgtgagcgcacgcatggtttaagcaacgaagaacgcctggagctctggacattaaaccaggagctggcgaaaaagtga

SEQ ID NO: 41 - DNA, 1842 bp, Escherichia coli
atggagcaaaacccgcagtcacagctgaaacttcttgtcacccgtggtaaggagcaaggctatctgacctatgccgaggtcaatgaccatctgccggaagatatcgtcgattcagatcagatcgaagacatcatccaaatgatcaacgacatgggcattcaggtgatggaagaagcaccggatgccgatgatctgatgctggctgaaaacaccgcggacgaagatgctgccgaagccgccgcgcaggtgctttccagcgtggaatctgaaatcgggcgcacgactgacccggtacgcatgtacatgcgtgaaatgggcaccgttgaactgttgacccgcgaaggcgaaattgacatcgctaagcgtattgaagacgggatcaaccaggttcaatgctccgttgctgaatatccggaagcgatcacctatctgctggaacagtacgatcgtgttgaagcagaagaagcgcgtctgtccgatctgatcaccggctttgttgacccgaacgcagaagaagatctggcacctaccgccactcacgtcggttctgagctttcccaggaagatctggacgatgacgaagatgaagacgaagaagatggcgatgacgacagcgccgatgatgacaacagcatcgacccggaactggctcgcgaaaaatttgcggaactacgcgctcagtacgttgtaacgcgtgacaccatcaaagcgaaaggtcgcagtcacgctaccgctcaggaagagatcctgaaactgtctgaagtattcaaacagttccgcctggtgccgaagcagtttgactacctggtcaacagcatgcgcgtcatgatggaccgcgttcgtacgcaagaacgtctgatcatgaagctctgcgttgagcagtgcaaaatgccgaagaaaaacttcattaccctgtttaccggcaacgaaaccagcgatacctggttcaacgcggcaattgcgatgaacaagccgtggtcggaaaaactgcacgatgtctctgaagaagtgcatcgcgccctgcaaaaactgcagcagattgaagaagaaaccggcctgaccatcgagcaggttaaagatatcaaccgtcgtatgtccatcggtgaagcgaaagcccgccgtgcgaagaaagagatggttgaagcgaacttacgtctggttatttctatcgctaagaaatacaccaaccgtggcttgcagttccttgacctgattcaggaaggcaacatcggtctgatgaaagcggttgataaattcgaataccgccgtggttacaagttctccacctacgcaacctggtggatccgtcaggcgatcacccgctctatcgcggatcaggcgcgcaccatccgtattccggtgcatatgattgagaccatcaacaagctcaaccgtatttctcgccagatgctgcaagagatgggccgtgaaccgacgccggaagaactggctgaacgtatgctgatgccggaagacaagatccgcaaagtgctgaagatcgccaaagagccaatctccatggaaacgccgatcggtgatgatgaagattcgcatctgggggatttcatcgaggataccaccctcgagctgccgctggattctgcgaccaccgaaagcctgcgtgcggcaacgcacgacgtgctggctggcctgaccgcgcgtgaagcaaaagttctgcgtatgcgtttcggtatcgatatgaacaccgactacacgctggaagaagtgggtaaacagttcgacgttacccgcgaacgtatccgtcagatcgaagcgaaggcgctgcgcaaactgcgtcacccgagccgttctgaagtgctgcgtagcttcctggacgattaa

SEQ ID NO: 42 - DNA, 2091 bp, Escherichia coli
atgtggcgcagactgatttatcaccccgatatcaactatgcacttcgacaaacgctggtgctatgtttgcccgtggccgttgggttaatgcttggcgaattacgattcggtctgctcttctccctcgttcctgcctgttgcaatattgcgggccttgatacgcctcataaacgttttttcaaacgcttaatcattggtgcgtcgctgtttgccacctgtagcttgctgacacagctactactggcaaaagatgttcccctgccctttttgctgaccggattaacgctggtacttggcgtcactgctgagctggggccattgcacgcaaaattgcttcctgcatcgctgctcgccgccatttttaccctcagtttggcgggatacatgccggtctgggaaccgttgctcatctatgcgttgggcactctctggtacggattgtttaactggttttggttctggatctggcgcgaacaaccgctgcgcgagtcactaagtctgctgtaccgtgaactggcagattattgtgaagccaaatacagcctgcttacccagcacaccgaccctgaaaaagcgctgccgccgctgctggtgcgccagcaaaaagcggtcgatctaattacccagtgctatcagcaaatgcatatgctttccgcgcaaaataatactgactacaagcggatgctgcgtattttccaggaggcgctggatttacaggaacatatttcggtcagtttgcatcagccggaagaggtgcaaaagctggtcgagcgtagccatgcggaagaagttatccgctggaatgcgcaaaccgtcgccgctcgcctgcgcgtgctggctgatgacattctttaccatcgcctgccaacgcgttttacgatggaaaagcaaattggcgcactggaaaaaatcgcccgccagcatccggataatccggttgggcaattctgctactggcatttcagccgcatcgcccgcgtgctgcgcacccaaaaaccgctctatgcccgtgacttactggccgataaacagcggcgaatgccattacttccggcgctgaaaagttatctgtcactaaagtctccggcgctacgcaatgccggacgactcagtgtgatgttaagcgttgccagcctgatgggcaccgcgctgcatctgccgaagtcgtactggatcctgatgacggtattgctggtgacacaaaatggctatggcgcaacccgtctgaggattgtgaatcgctccgtgggaaccgtggtcgggttaatcattgcgggcgtggcgctgcactttaaaattcccgaaggttacaccctgacgttgatgctgattaccaccctcgccagctacctgatattgcgcaaaaactacggctgggcgacggtcggttttactattaccgcagtgtataccctgcaactattgtggttgaacggcgagcaatacatccttccgcgtcttatcgataccattattggttgtttaattgctttcggcggtactgtctggctgtggccgcagtggcagagcgggttattgcgtaaaaacgcccatgatgctttagaagcctatcaggaagcgattcgcttgattcttagcgaggatccgcaacctacgccactggcctggcagcgaatgcgggtaaatcaggcacataacactctgtataactcattgaatcaggcgatgcaggaaccggcgtttaacagccattatctggcagatatgaaactgtgggtaacgcacagccagtttattgttgagcatattaatgccatgaccacgctggcgcgggaacaccgggcattgccacctgaactggcacaagagtatttacagtcttgtgaaatcgccattcagcgttgtcagcagcgactggagtatgacgaaccgggtagttctggcgatgccaatatcatggatgcgccggagatgcagccgcacgaaggcgcggcaggtacgctggagcagcatttacagcgggttattggtcatctgaacaccatgcacaccatttcgtcgatggcatggcgtcagcgaccgcatcacgggatttggctgagtcgcaagttgcgggattcgaaggcgtaa

SEQ ID NO: 43 - DNA, 777 bp, Escherichia coli
atgattgttttacccagacgcctgtcagacgaggttgccgatcgtgtgcgggcgctgattgatgaaaaaaacctggaagcgggcatgaagttgcccgctgagcgccaactggcgatgcaactcggcgtatcacgtaattcactgcgcgaggcgctggcaaaactggtgagtgaaggcgtgctgctcagtcgacgcggcggcgggacgtttattcgctggcgtcatgacacatggtcggagcaaaacatcgtccagccgctaaaaacactgatggccgatgatccggattacagtttcgatattctggaagcccgctacgccattgaagccagcaccgcatggcatgcggcaatgcgcgccacacctggcgacaaagaaaagattcagctttgctttgaagcaacgctaagtgaagacccggatatcgcctcacaagcggacgttcgttttcatctggcgattgccgaagcctcacataacatcgtgctgctgcaaaccatgcgcggtttcttcgatgtcctgcaatcctcagtgaagcatagccgtcagcggatgtatctggtgccaccggttttttcacaactgaccgaacaacatcaggctgtcattgacgccatttttgccggtgatgctgacggggcgcgtaaagcaatgatggcgcaccttagttttgttcacaccaccatgaaacgattcgatgaagatcaggctcgccacgcacggattacccgcctgcccggtgagcataatgagcattcgagggagaaaaacgcatga

SEQ ID NO: 44 - DNA, 414 bp, Escherichia coli
atgcgtaactttgatttatccccgctttaccgttctgctattggatttgaccgtttgtttaaccacttagaaaacaaccagagccagagtaatggcggctaccctccgtataacgttgaactggtagacgaaaaccattaccgcattgctatcgctgtggctggttttgctgagagcgaactggaaattaccgcccaggataatctgctggtggtgaaaggtgctcacgccgacgaacaaaaagagcgcacctatctgtaccagggcatcgctgaacgcaactttgaacgcaaattccagttagctgagaacattcatgttcgtggtgctaacctggtaaatggtttgctgtatatcgatctcgaacgcgtgattccggaagcgaaaaaaccgcgccgtatcgaaatcaactaa

SEQ ID NO: 45 - DNA, 897 bp, Escherichia coli
atgaccgatttacacaccgatgtagaacgctacctacgttatctgagcgtggagcgccagcttagcccgataaccctgcttaactaccagcgtcagcttgaggcgatcatcaattttgccagcgaaaacggcctgcaaagctggcagcaatgtgatgtgacgatggtgcgcaattttgctgtacgcagtcgccgtaaagggctgggagcagcaagtctggcgttacggctttctgcgctacgtagcttttttgactggctggtcagccagaacgaactcaaagctaacccggcgaaaggtgtttcggcaccgaaagcgccgcgtcatctgccgaaaaacatcgacgtcgacgatatgaatcggctgctggatattgatatcaatgatcccctcgctgtacgcgaccgtgcaatgctggaagtgatgtacggcgcgggtctgcgtctttctgagctggtggggctggatattaaacacctcgacctggagtctggtgaagtgtgggttatggggaaaggcagcaaagagcgccgcctgccgattggtcgcaacgctgtggcgtggattgagcactggcttgatttgcgcgacctgtttggtagcgaagacgacgcgctttttctgtcgaaactgggcaagcgtatctccgcgcgtaatgtgcagaaacgctttgccgaatggggcataaaacaagggctgaataatcacgttcatccgcataaattacgtcactcgttcgccacgcatatgctggagtcgagcggcgatcttcgtggtgtgcaggagctgctgggtcatgccaacctctccaccacgcaaatctatactcatcttgattttcaacaccttgcctcggtgtacgatgcggcgcatccacgcgccaaacgggggaaataa

SEQ ID NO: 46 - DNA, 1659 bp, Escherichia coli
gtgttgaccccgttgacggccttcgcgggagtgcggttgcgctggcctgccatgatgcgactcacttgcatcggcattctggcgcagttcgcgctcctgctgctcgcctttggcgtactgacgtattgttttctcatcagcgatttctcggtcatttatgtcgcgcaacatagctatagcctgctgtcgtgggaactcaagctggcagcggtgtggggcggccatgaaggttcgctgctgctttgggtgctgctgctttccgcctggagcgcgctgtttgcctggcattatcggcagcaaaccgatccgctatttccgctgacgttagccgttttatctctcatgctcgccgcactgctactgtttgtggtgctgtggtccgatcccttcgtgcggatatttccaccagcaatcgaaggccgcgatctcaatccgatgctgcaacatcccggtcttatctttcatccaccgctgctttaccttggctatggcggtttgatggtagcggcgagcgtggcgctggcgagtctactgcgcggcgagtttgatggtgcctgcgcccgaatttgctggcgctgggcgttacctggctggagtgcattaacggcggggatcatcctcggttcctggtgggcctactgcgaactcggctggggcggctggtggttctgggatccggtggaaaacgcctctttattaccctggctttctgccactgcgctgctgcacagtttgtccctgacacgccagcgggggattttttgccactggtcgctgttgctggcgatagttactctgatgctgtcgctgctgggcaccttaattgtccgttctggcattctggtttcggttcatgcgttcgcgctggataacgtccgcgccgtgccgttgttcagcctgtttgcactgattagccttgcgtctctggctctgtatggctggcgagcgcgggacggtggcccggcggtgcatttttcggggttatcgcgggaaatgttaatcctcgctacgctgttgctgttttgcgcagtgctactgatcgtgctggtgggaacgctttatccgatgatttacggcctgctgggctggggacgcctctccgttggcgcgccgtattttaaccgcgcgacgttaccgtttggtctgttgatgctggtggtgattgtgctggcgacgtttgtctctggcaaacgcgtgcagcttccggcgctggtagctcatgcgggcgtgctgttatttgccgctggggtcgtggtctccagcgtcagccgtcaggagatcagcctgaatttacagccgggtcagcaggtgacgctggcaggatacaccttccgttttgagtgcctcgatctacaagccaaaggcaattacaccagcgaaaaagcgatagtggcactgtttgaccatcagcaacgcattggtgaactgacgccggagcggcgtttttatgaagcacgccgtcaacaaatgatggaaccgtcaattcgctggaacggcatccatgactggtatgcggtcatgggggagaaaactgggccggatcgttacgcttttcgtttgtatgtacaaagcggtgtgcgctggatctgggggggaggattgttgatgattgcgggcgcattgttaagcggatggcgggggaagaagcgcgatgaataa

SEQ ID NO: 47 - DNA, 450 bp, Escherichia coli
atgaaaaagattgcatttggctgtgatcatgtcggtttcattttaaaacatgaaatagtggcacatttagttgagcgtggcgttgaagtgattgataaaggaacctggtcgtcagagcgtactgattatccacattacgccagtcaagtcgcactggctgttgctggcggagaggttgatggcgggattttgatttgtggtactggcgtcggtatttcgatagcggcgaacaagtttgccggaattcgcgcggtcgtctgtagcgaaccttattccgcgcaactttcgcggcagcataacgacaccaacgtgctggcttttggttcacgagtggttggcctcgaactggcaaaaatgattgtggatgcgtggctgggcgcacagtacgaaggcggtcgtcatcaacaacgcgtggaggcgattacggcaatagagcagcggagaaattga

SEQ ID NO: 48 - DNA, 915 bp, Escherichia coli
atgacggttcctacctatgacaaatttattgaacctgttctgcgttatctggcaacaaaaccggaaggtgcagccgcgcgtgatgttcatgaggctgccgcggatgcattaggactggatgacagccagcgagcgaaagtcattaccagcggacaacttgtttataaaaatcgtgcaggctgggcgcatgaccgtttaaaacgtgccgggttgtcgcaaagtttgtcgcgtggcaaatggtgcctgactcctgcgggttttgactgggttgcgtctcatccccagccaatgacggagcaggagacgaaccatctggccttcgcttttgtgaatgtcaaacttaagtcacggccggatgccgtcgatttagatccgaaagccgactctcccgatcatgaagaacttgcaaagagcagcccggacgatcggttagatcaggcgctaaaagagcttcgtgatgcggtggctgatgaggttctggaaaacttattgcaggtttctccttcgcgctttgaagtcattgttctggatgttttgcatcgcctggggtatggcggccaccgtgatgatttgcagcgtgttggcggtactggagatggtggcatcgatggtgtgatatcgcttgataaacttggcctggagaaagtttatgttcaggcaaaacgttggcagaatactgtaggcaggccagaattacaggcattttacggcgcactggctgggcaaaaagcgaaacgtggggtgtttattaccacttctggatttacttctcaggcgcgtgactttgcccaatccgtcgagggtatggtgttggttgatggggaacgcctggtgcacttaatgatcgaaaacgaagtaggggtttcttcacgtttgttgaaggtgccgaaactggatatggactattttgagtga

SEQ ID NO: 49 - DNA, 1929 bp, Saccharomyces cerevisiae
atgtcaaaagctgtcggtattgatttaggtacaacatactcgtgtgttgctcactttgctaatgatcgtgtggacattattgccaacgatcaaggtaacagaaccactccatcttttgtcgctttcactgacactgaaagattgattggtgatgctgctaagaatcaagctgctatgaatccttcgaataccgttttcgacgctaagcgtttgatcggtagaaacttcaacgacccagaagtgcaggctgacatgaagcacttcccattcaagttgatcgatgttgacggtaagcctcaaattcaagttgaatttaagggtgaaaccaagaactttaccccagaacaaatctcctccatggtcttgggtaagatgaaggaaactgccgaatcttacttgggagccaaggtcaatgacgctgtcgtcactgtcccagcttacttcaacgattctcaaagacaagctaccaaggatgctggtaccattgctggtttgaatgtcttgcgtattattaacgaacctaccgccgctgccattgcttacggtttggacaagaagggtaaggaagaacacgtcttgattttcgacttgggtggtggtactttcgatgtctctttgttgttcattgaagacggtatctttgaagttaaggccaccgctggtgacacccatttgggtggtgaagattttgacaacagattggtcaaccacttcatccaagaattcaagagaaagaacaagaaggacttgtctaccaaccaaagagctttgagaagattaagaaccgcttgtgaaagagccaagagaactttgtcttcctccgctcaaacttccgttgaaattgactctttgttcgaaggtatcgatttctacacttccatcaccagagccagattcgaagaattgtgtgctgacttgttcagatctactttggacccagttgaaaaggtcttgagagatgctaaattggacaaatctcaagtcgatgaaattgtcttggtcggtggttctaccagaattccaaaggtccaaaaattggtcactgactacttcaacggtaaggaaccaaacagatctatcaacccagatgaagctgttgcttacggtgctgctgttcaagctgctattttgactggtgacgaatcttccaagactcaagatctattgttgttggatgtcgctccattatccttgggtattgaaactgctggtggtgtcatgaccaagttgattccaagaaactctaccatttcaacaaagaagttcgagatcttttccacttatgctgataaccaaccaggtgtcttgattcaagtctttgaaggtgaaagagccaagactaaggacaacaacttgttgggtaagttcgaattgagtggtattccaccagctccaagaggtgtcccacaaattgaagtcactttcgatgtcgactctaacggtattttgaatgtttccgccgtcgaaaagggtactggtaagtctaacaagatcactattaccaacgacaagggtagattgtccaaggaagatatcgaaaagatggttgctgaagccgaaaaattcaaggaagaagatgaaaaggaatctcaaagaattgcttccaagaaccaattggaatccattgcttactctttgaagaacaccatttctgaagctggtgacaaattggaacaagctgacaaggacaccgtcaccaagaaggctgaagagactatttcttggttagacagcaacaccactgccagcaaggaagaattcgatgacaagttgaaggagttgcaagacattgccaacccaatcatgtctaagttgtaccaagctggtggtgctccaggtggcgctgcaggtggtgctccaggcggtttcccaggtggtgctcctccagctccagaggctgaaggtccaaccgttgaagaagttgattaa

SEQ ID NO: 50 - DNA, 921 bp, Saccharomyces cerevisiae
atgtccgacgaaattgtttggcaagtgattaatcaaagtttctgctctcatagaattaaggcacctaatggtcaaaatttttgcagaaatgagtataacgtcactgggttgtgtacaaggcaatcatgcccacttgccaactccaagtatgcaacagtgaagtgtgacaatgggaaactgtacttgtatatgaagacgcctgaaagagcgcacactcctgccaagttatgggaaagaatcaaactatccaaaaattacacgaaggctttacaacagatcgacgaacacctactacattggagcaagtttttccgtcataagtgtaaacagagatttacaaaattgacgcaggtcatgataacagagagacgtttagcattaagggaggaggagagacactacgttggtgtagcaccaaaggtcaaaagaagagaacaaaacagggagagaaaggcattggtagctgccaagattgaaaaagccatcgaaaaagaattgatggacagattaaagagtggtgcttacggtgataaaccattaaatgttgacgaaaaggtctggaagaagataatgggtcaaatggaagaggagaattctcaggacgaggaagaagactgggatgaagaagaggaaagtgatgatggggaagttgaatacgttgcagatgatggcgaaggtgaatacgttgacgtggatgacttagaaaagtggttagctgactctgacagagaagcttccagcgccagtcaaagcgaaagcgacagtgaaagcgagagcgacagcgatagtgatgaagaaaataagaattcagccaagagacgtaagaagggaactagtgccaaaactaaacgtcctaaagtcgaaatcgaatacgaggaggaacacgaagttcaaaatgctgagcaagaagtggcacaataa

SEQ ID NO: 51 - DNA, 1869 bp, Saccharomyces cerevisiae
atggtacgtcgatggattcctagtggcaggcatcttcgcaataatgacaacactggtgatgatgacgacagcgagttcacaaactcgatggattctgggatgtccataccatcactcagggactccatgaccacgaggtcatctcataacgatcccatcaagcctgctctgatgaacgattccaacaaagtcaaaaatttggagaaggagttgactaatgccaaaatcaagattcaagtactctatgaatacattcgcagaatccctaataaagacggcaatgcaccatcgctgggcaatgacactgattttagaaattcgattatcgagggtctaaatcttgaaataaacaaattgaaacaggatttaaaggcgaaggaagtcgagtaccaagatacgctacaattcgttcaagagaatttagaaaattcggaaagtatcgtgaatacgatcaatcacctattgtcctttatattgacgcattttaatgagcaagatgaaaatgcccatcttcttgataaagaagagagggagaccctggaggaaactttagagctgagctcggattatgttcttgaaaaaatggatactttgtccaagttcatcatccaattcttgcaggactttttgcattccaaaagtcgagcggaatcaaagcaggataaggaagaatttctttcactggcccagtcctcaccagcaggatcacagttagaaagtagggactcaccatcaagtaaagaggagaatactgatggtggataccagaatgacgaaattcatgacagtaacaaccacattgatacagaaaatgtaatggcaaacagtacttccttaccaatttcagccgtcgagtctcgttttgagaaaaccttagacactcaattagagattgtcatagaaattttgcacaaagaatatgatcaatttataaattccattagattgaaattcgagaaatcgcaaaaattagaaaaaataatagcgtccaaactaaatgagcagtctcatctactagattccttagaattggaagaaaattctagttccgttatagaaaaacaagatcatttgatttcccaactgaaggaaaagatcgaatcgcaatctgttttgataaacaatttggaaaaattgaaggaagacatcattaaaatgaaacaaaatgaaaaagttttaaccaaagaactggaaactcagaccaaaatcaataaactaaaggaaaataattgggacagctacatcaatgacttggaaaaacaaatcaatgaccttcaaatcgataaatcagaggaattccacgtaatacaaaatcagttagacaaattagacttggagaattaccaattaaaaaatcagttaaatactttggacaaccaaaagttaatactatcccaatatgaaagcaattttatcaaatttaatcagaaccttttactacaccttgacagtattttcaatattctgcagaaaatcttacaagaaagttctattgcccaatttgacaggaaaatgaaatccataaaatctgtaccaaatgcgttgaaaaacttgaatttgattcagcccaaactagaatcgctctacacttttatagagactgcattagagtccataataaactcatatatctcttcactgatttccatggaaaccccagagcagccacatcaacagggcaatgaattaacggcaactccaaataaagaactgaccttacgaatagaggagttacaaagaagatggatatccgaaagagaaagacggaagctcgatgctaacgcttcagaagctcgaatcaaggctttagaacaggaaaatgagtcattgagatcgaaacttttcaacctatcaatcaacaatccctaa

SEQ ID NO: 52 - DNA, 705 bp, Saccharomyces cerevisiae
atgcaaacaccttcagaaaataccgacgtaaagatggatactctcgacgaacccagtgcacatttaatcgaagagaatgtagctcttcccgaagacacattcagttcacatctgagttatgtactttatgaaattgctcattgtaaaccgatcatgtttatgatcatcataatcgtgagtttgatctcattgattgtgctttttcatgataacgacgggtgcactgtgatcttagtgatgtcccttatagtagcctccatggctttaatggtggttgcagcattcacattcgggaaagcgatcactgaacaggagttcatgataaagcttttagtggaggtgatcgcacgcaagcctgcggggaaggaatggggtactgtcgcatataatatgaaccaatatctattcatgaagagactatggtataccccgtactatttctatagcggcaagaagtgccatgagttcttcaccactcttatcaaggaagtgaattctggttcgcactcggattcctcatcgaatagtgccgaggatacacaatcacctgtctcagcagggaagacttcaaatggtctaaacaacttttatagtattagatcagaccctattttgatggcatatgttttgaaggcaacacaaatagaaaaggaggctcaaagtgaatactggagaaagcaatatcctgacgctgatttaccttga

SEQ ID NO: 53 - DNA, 486 bp, Saccharomyces cerevisiae
atgccacaagtacagtcgtggtttcctgttcagaaacaaccgacgctagcggtaacatttacaccattaccacaactgtcccatgctcatctaccactgccaccatcacatcttgtgacgaaaacggatgccatgttccagcaccaactgctaccgacgcaactgcaaccgtttcctccaagtcatacaccactgttactgttactcactgtgacaacaatggctgtaacaccaagactgtcacttctgaatgttctaaagaaactgcagcaaccaccatttctccaaaatcatacactactgttaccgttactcactgtgacgacaacggctgtaacaccaagactgtcacttccgaggcttccaaacaaacatcattggccactagcacagtcaccaagtctgctgctccaacttctcatactgctgcttccagcaccttcactggtattgtcgttcaatccgaaggtatggctgctggtttga

SEQ ID NO: 54 - DNA, 435 bp, Saccharomyces cerevisiae
atgaataccaacgagtccgaacatgttagcacaagcccagaggatactcaggagaacggtggaaacgctagctccagcggcagtttgcagcaaatttccacgctaagagagcaggacagatggctacccatcaacaatgtagcgcgactcatgaagaatactctcccaccgagtgctaaggtatcgaaagatgcgaaagagtgcatgcaggagtgtgtcagtgagctcatttcttttgtgactagcgaggccagcgatcgatgcgctgctgacaaaagaaagacgataaacggggaagacattctcatatcattgcacgccttaggattcgagaactatgcagaggtgttgaaaatctacttggctaaatacaggcaacaacaggcgctgaagaatcaactaatgtatgagcaggacgacgaagaggtgccttga

SEQ ID NO: 55 - DNA, 315 bp, Saccharomyces cerevisiae
atgttgttcaaaccaaaaacacgagcaataccatcaccgactgcaagaactctaccagtttcgttcaaattggcctcgtcggacacacccttaattctttcctctaagatggaggaaacttctgtgggttgtgccttggtggaagccaatcttctggtggaagccaaagcagcagcggcaggtcttgcggccttggtagagttaattagagttctcgatagagaacgaatagcagcagtacgagccaacattattatatgtgcgtgttttttttatttattttgttactgttcttgcgatagttatgagagctga

SEQ ID NO: 56 - DNA, 336 bp, Saccharomyces cerevisiae
atgtccctacggccttgtctaacaccatccagcatgcaatacagtgacatatatatataccctaacactaccctaaccctaccctatttcaacccttccaacctgtctctcaacttaccctcacattaccctacctctccacttgttaccctgtcccattcaaccataccactcccaaccaccatccatccctctacttactaccaccaatcaaccgtccaccataaccgttaccctccaattagccatattcaacttcactaccacttaccctgccattactctaccatccaccatctgctactcaccatactgttgttctaccctccatattga

SEQ ID NO: 57 - DNA, 1302 bp, Saccharomyces cerevisiae
atgattgtggggttgacactttattttgtattattccgttcaatacagtatttactggtttttttgactccaattaggcagtttgatacatcaacatcacttttattaaacgaattatgttcttctccctctgaaatcaacagttattggaacaagtatttttggaataagctactatcatgggacagtgttttttttatcaagaacataacttccaaaaacggaaaacctcaatttgagcatgaatacgcgttttctcagttgtggacttttttcgttaggctgtttattaaaagtaataacgatagcatctaccatgccttaagggttggagttgcaatagaaaatgttttattttacttgtcaggtattgttttatattttctaacaaaaaaaattttcagccaaaatataaggcaatcacagtttgctagaactatcgctaaaaaaacatctctgttgtttttcttaacgagtgccgctggatttttaacaagcatatattctgaaccattatcttttttttttgcatttgttggtatttggagtcgtgaatgcaccatttccgtgcccgtattgggtcaattcgatatttcgtggagatattggtttccttactcctttatcagcatggcttgctttaccttagcatccttgaatcgttcaaactgtgttttgttagggatttactttatttttgaccttattgaactaacaaagaacaggaagtttgtaaaagcaatatgtttcccactattatcaggatcattaatgttttctgctctactatatcaacaatattacctaccatataagacattttgtcctcaaaggggtgaatggtgtaaatctcaattgttttcaagcatttttatcacgaaaacttctttatattcctacattcagagtcattattggggagttgggttattgaaatactggaccccaaacaacatcccaaactttttgtttgctgtcccaaatattattattttaatctattcctccatatatttcagcaaaatttatccctcctataacttgaaggctctcgtatggatcaccagagcactggtcgtcatagtatgcttttttgcccatgtccaaattctgaatcgtatagcctcctttttacccttgcacctttggtatttggctgatagattggttaaaacttctgatccaaaaaaaatggaaaatccgaaaggtgacgataagatagtcaagttttacatatactggttggcattctggatacctttacagactatcctatttgcagcttttttaccaccagcctga

SEQ ID NO: 58 - DNA, 873 bp, Saccharomyces cerevisiae
atggaaaagctattacagtggtctattgcgaattctcaaggggacaaagaagctatggctagggccggccaacctgatcctaaattgctacagcagttattcggtggtggtggtcctgacgatccaaccttaatgaaagaatccatggctgttattatgaatccggaggttgacttagaaacaaaactcgttgcatttgacaactttgaaatgttgattgagaacttagataatgctaataatatcgaaaatttaaaactgtgggagccattgttggatgttcttgttcagacgaaggatgaagaactacgtgctgctgctttatccattattggaacggctgtgcaaaacaacttggattcgcaaaataatttcatgaaatacgacaatggtctgcgaagccttatcgaaatagctagtgacaagacaaagccactcgacgtgagaacaaaagctttttacgcactatctaatctaataagaaaccacaaagatatctcagaaaagtttttcaaattaaatgggctcgactgcatagcacctgtattaagtgataacaccgccaaaccaaaactgaaaatgagagccattgccttattgaccgcatatttgtcatctgttaagattgatgaaaatataatcagtgtgctgagaaaggatggagtaattgaaagtacgattgagtgcttgtctgacgagagtaacttgaacatcatagatagagttctgtcttttctctctcacctgatatcttccggaataaaatttaatgaacaggaattgcacaaattgaacgaaggttacaaacatatcgagcctctaaaggacagacttaatgaagacgattatttagccgtaaagtatgtattatga

SEQ ID NO: 59 - DNA, 1035 bp, Saccharomyces cerevisiae
atgcattgcccaatttgccaccatagagcgcatgtagtgtactgtgcacattgtatcaatacgagcccaagtctgctactgaagctaaaactagatttaattttattaaaggatgagaataaagaacttaacgggaaagtcgaacaaatattaaacgaggccatgaactatgaccagttagatatcaagaggatggagaaaaagaaagatcccctgatgaatagtctcatgaagttagatgttttacgaatgaaaaagaataataacctgattaggcacaggatagaacagctaaatgagcggatttatagtaaaaggaatcacatcagcgaattgaaagtagaaattgacaattataaatgttataaggtgggtactggtacggacaaattaagagagcaagtggaaattagtgatgcaaaaaataagctggcacaagtatcgaagatttgtgaatcggctagagattacaagctcaatctactaaataattggtttgtgatccagaagctgcaagataatttccaaatacctttcgctatagcttttcagccactaatatctttgaaaaacttccgtattttacctcttgctataacaaacgattccatcaacatcatgtggaagtatattagcttcttctcagacattcttatgattaaacttccctacacaaataaaatctgtgaacaacccatgtttgagttttccgatagcatacagacagtagtacaaaggttgatcaagcttatcataaatattttacagatatgtagacatttgaaactcgtaccttcaacacccatggatatcccatggctactggaccagtacgatgtggatgggctgttctataatatggtgaaacggaacaagatgaagtgtaggtccgtctcgctatattggacttttgggatgttgtactcgatggttttggataacatgaataatccacaaagaggacatcctgcaaggcggaccgcaccacctccaacagtcacaggacctcatgaccgatggtacgtggtaggctag

SEQ ID NO: 60 - DNA, 939 bp, Saccharomyces cerevisiae
atgaatataatgaaaagacaattatgcacctcctctaagcgatttttttctacagcaaaaaacgttgtcaaatataatacgattcaggatatcaggaacaaatattttactggtacgcctttgtcgatgtgtactgcgtatgacttcattactgcaacatgggttaacaaggctaattgtgatttactcttagtcggagattctttggcgatgacttcattggggtacgatagcacaattacactatccttgaatgagtttaaatatcatgttgcctctgtgtgcagagctgaaggttcttccatggtagtggtagacatgccattcggtacgtttgaatcgggcatatctgatggcttgaagaatgccatagatatcatgaaattggacagtaaagtcacctcagtcaaagttgaagtcggttcttacaccaaagacaaatatgcaatgaaatttattgaagaactgtgctcccggggtatacctgttatggctcatataggactaactccccaaaaagttcattcacttggaggttataaagtgcaaggtagcaaaagtctattacaaatgcaggagctgtatgaaaccgccatgcaactacaaaaaattggctgttggtctatcctgattgaatgtgtcccccataagatggctcagttcataacatctaaactctcagtaccaacaataggtatcggtgcaggtaacggtaccagtggacaagttctagttatatctgaccttctcgggatgcaaggcgattctgtcccaaaatttgtgaagcaagctgtaaatatgacagatattgccactcagggcttgaaggagtacattgcaagtgtagaggataggacatttcctgagagaggtactcatactttcaaagttaaggaggacttatggaatgaattcctctcttcaattaacgaaaagtaa

SEQ ID NO: 61 - DNA, 1128 bp, Saccharomyces cerevisiae
atgaatatggcagaacgtgcagaagcaacaaaaagttggtcctgtgagcccctttctggaaagacgctagaagagattgttcaaaatgcagaaaatgcagctgatttggtagcttacattcgcaaaccagaggtagatttggactttaggttgaagtttatcgcagaacatgaggagttttttaatgaacaactatcggatcgaaattcaagaataaggacgtgtcacaacttgagcgataaagggatacggggtgatactgttttcgtcttcgtgcctgggttggctggcaacttagaacaatttgaacccttactcgagcttgtggactctgatcaaaaggcatttttgacgttagatctgcccggctttggtcatagttcagaatggagcgactaccccatgctgaaagtggtggaacttattttcgttcttgtatgtgacgtcttaagaaaatggtctacagcggtgccgaataatgataacgtaaatccatttaacggtcataagatagtgcttgtagggcattctatgggttgttttctggcatgtcatctttacgagcagcacatggctgatacaaaagcggtacaaacgctagttttgttgacgccccccaaagcacatatcgagcagctttctaaggataaacatattatccagtgggctctctatggtgtgtttaaattgccatggctatttgacgtttatagaaacaaattcgatcaggtaaaaggtctacaaagttccggcatcaagcagtatttttatcaacaaggtgatgatgtcaagttgaaatacaggaagttctggcaatttaaaaacaacataagcaacaaaagtagaaccatcataggttatttactaggatgggaaactgttgattgggttaaattcaatggtgtattgacgcaaacggatatgaaacagaaaattataatatttggcgctgaaaaagatcctatagctcctattgaaaatttggaattttacaaacaaactataaataaagaatgtcttcgtaaagtgattattttacctgactgttctcataatttatgcttcgaccgtccagaattggtgtgtgaaaactttcaacgagaggtgattgataattccaaattgtag

SEQ ID NO: 62 - DNA, 1347 bp, Saccharomyces cerevisiae
atgttgcgacttttttcactggcacttatcacatgcttaatctactattccaaaaatcagggcccatctgctcttgttgcggccgtgggatttggtatagcaggctatttagctacagatatgttgattccacgtgtgggcaaatccttcatcaaaataggcctattcggtaaggacttgagtaaacctggccgtccggtgcttccagaaacaataggtgctatccctgctgcagtttatttatttgtaatgttcatttacattcccttcattttctacaagtatatggtcataaccacttcaggtgggggccatcgcgatgtctcagtggttgaagataacggtatgaattctaatatttttcctcatgataaactatctgaatatttgagcgctatcctatgcttggaaagtacggtcctcttgggtatcgctgatgatttatttgatttacgttggagacataagtttttcttgcctgccattgcagccatcccactgctaatggtttattatgtggattttggagttacgcatgtacttattcccggattcatggaacgctggttgaaaaagactagtgttgatttggggctgtggtattatgtttatatggcatcgatggcaattttttgccccaactccatcaacatcctggcaggtgttaatggtttagaggttggccaatgtatagtgttggccatcttagcgctattgaacgatttgctgtacttctcgatggggccattagccacaagagactcccataggttttccgctgttttgattatcccatttttgggtgtatccttggcgctatggaaatggaatcgttggcccgccacagtgtttgtgggagatacatattgttatttcgctggaatggtattcgcagtcgttggtatactgggtcatttttcaaagacgatgcttttgctattcattcctcaaatcgttaattttatttattcatgtcctcagctattcaaattggtcccctgcccgagacataggttacctaaatttaatgaaaaagacggtttaatgtatccatcaagagcaaacttaaaagaagaaccgccaaagagcatttttaaaccgatcttgaagttactatactgtctccatttgattgacctggaatttgatgaaaataatgagattattagcacctctaatatgacgttaataaacttgacattagtatggtttggccctatgagggaagacaaattgtgcaatacaatcttgaagttgcaattctgcattggaattttggctttacttggaagacacgctataggcgctatcatctttggccacgacaacctatggacagtacgttga

SEQ ID NO: 63 - DNA, 2064 bp, Saccharomyces cerevisiae
atgaaacctccgttaaacatgtcacgttcaaataaaccacttactcaggaagctaatagttcggcgcatattgatagggcacatcagctagcacaggattttaacagtaaacaggatgataccgcactaacttcactgccccacaagaaccccgacatattcagatttgagaacaacatcacagctcatagctcgcgtcgtggttctctatatagagacagcgatgctactgtggttttgccgctttctgaacatacccctagattatcaatggatgatccataccgccaattactacaacaggctgaaatctcacaactacgaagtaagaaaaaaaggcattccagtcgagttttgcgtacttcgtttatatcttttgtggtgctagtttcctcgctgtcagggttggaccaaggcctcatatctggtaacgttatgactttgtcgttccagaagtattttcattacccacttacttctccgctgggcaatatagtgagcattgttaatctgggtgcgttcatggcgtcgttatttgtctattctggcatcctggagccttgtagcaggaaaaaaatgctccaaataagcacaatgatatactctttgggtgccattgttcaggtcttggctctaaaccaatggtgtttactactgggtagattcttactcggagtaggtatgggctttgccttttctatggtaataatttatcaattcgagtttccccttccctgtataagaaaacggacattaatttccattcaatgcgtctctagtgtcattgcgtattcattcggaatatggattaattgtgctttcagatatttgggctttgcatggagataccctttgtcaacacatgtggcacttggaataatactaaacctaatgtcgttctatcttattttagagtccccttcgtggctgttgaagcaaaagaacgacgtagaggcattggttttaatatcgaatgttttcgatgatggaaatttcgaagaaaaccaaactcagttgaaatttagggtcctgaaacgagacatattattaaagtcacaccttcaaaaaaactcctatccatatgcgtatatcttaaaggatttttcttcaataataaaattgttgataggtttccaacttctcacacgaacaaatggagtggatgctttcttgtattactcaccgttaatattacaacaaatggggagaggagaaagaaaatctatctatttaacggggcttaatgctttaatttacagcatcgtaatattagcatatgttcccttggtgttacggaaacgtaaagagaaaacgaatgtactcttaggttcgattgtgatgtgtgcattgctatttaccatatcttttacagactggtttcccaagagcacaacgaggtatatatcaatactatttgctgtttttctttttacgcacttcatcagttgggattctataggatgggttatgaccattgagcttctacctcacttgtcacaggccccagtgatactactagtctcaaacttttattggatttttaagtggttcgtcagcttaataacccctatacttattgaccgtctgtcttggaagttttatcttattccatctttatcttcctttatttccattatatttgtgctgaagatttttcctatagaaacccgtgacgaaaggttagattctgatgatgattctaccggaaacggtagcggtaaccatgatgatgtttttgacgataccggttctgaattctcctcctcaccatctttttccgcgtatcagataaacactctaggaagtagtatcaaacaaaataatcaagcctattcatctattcaaaatgagcagattctacccaaaaacggaaacttatcgaaccagacacacggttctgcacaaaatgtttatttcattacatctgattcaggaccatcaaggactggagaatttttcagttttcataacagaaccgatccaaatatcagcgacaacattgctgcgaataaacccagttcaggtggaggccagaattcgcctggagacatggcagttgcctag

SEQ ID NO: 64 - DNA, 633 bp, Saccharomyces cerevisiae
atgttctcatattcagatttctgttctatcggtacggccatgatcttatcggccacaacgttcctaatgggtgttttcttcagtaacatgccatacgattatcatcttttatttaatcctaactctactcaagagcatttcgatttggcactgagacattaccaaattttacatgagactccattgccggtgattgttactttgtgcgttgttgccggtattggcttagttggtggtacaattaaggttttcaagccaaaccctgaactgcagatgtttgagtattgttcattggggttgtacgtgttggctatctgtgtgtttctcactaatgtgaaaacaggtatcgactgttctgtgagccataattggggagaagttacggaaaatcagggtttggcagttattgcttcctccaacataattttattagttatgtttgccggtgttatcatcctacaaattggtttgtggtacagtaactgggatttgcaaaaaagattaaaggagttttatgctcaagaagaaagagaagctgccaatgccggtaaaaagactgagaaagttgacaatgcgaaaaagaatgataacaaatctaaaggtgctcaaaagaggaagaacgccaaaaaatag

SEQ ID NO: 65 - DNA, 354 bp, Saccharomyces cerevisiae
atgaatttagaagagagccaatcaaataggggtacgcttaatattaaaaaaatattagtaattgtttgtatgacgaataaaatttgtaagcacctgatccaatccttattattgagcaagagacgtcttgtttctgtactctttgataactatcaaggcgacatgaaactaaggtcatctccatctgccattcctctagttccgtcaacgaaaattcttcaagctatggaggcccggaacgacattgttgacagtctgatcatcaatagtcacgcaacggaaagtgatcgccggactttaggagaccatgaggttagacaatgtgaggataccaacttcggcttcaaaatttga

SEQ ID NO: 66 - DNA, 1152 bp, Saccharomyces cerevisiae
atgaaagagaatgaagtcaaagatgagaaaagcgtagatgtgttatccttcaaacagctcgaatcccaaaagattgttctacctcaagatcttttcagaagcagctttacctggttttgttatgaaatttacaagtccttagcgtttcgcatctggatgctattatggctaccacttagcgtctggtggaaactttccaacaattgtatttacccacttatagtttcacttctggtcctgtttctgggaccaatatttgtccttgttatttgtggactttctcgtaagcgttccttatcgaaacaactcattcagttttgcaaagagattactgaaaacacaccaagttctgatcctcatgattgggaagtcgttgtagcaaatctaaattcgtacttatatgaaaataaggcttggaatactaagaatttctttttcaatgctacggattgtgagaaaatgttcagaacaactgttcttgaaccattttctttgaaaaaagataaagctgccaaggttaagtcatttaaggattctgtcccttatatcgaagaggctttgcaagtgtatgctacaggatttgacaaacagtggaagttgtttattactgaaaaatcatggagccctgttggcctggaagacgttcagcttcccaaggatattcatcggtccaagcttacttggtttttaaagcggattttcactatttactctctaccattatggcttgcttttttgaactgtatctgcgtgtcacagcatttttgccttgcatttcgtatcttgtgtcctggattgtttttcctcatgatggtgtggcttttccaaaatatgaggacgactgctttactcgtgaaaatggaacacaagatgcaattcttgttgactattataaatgagcaagaaagtggtgcgaatggatgggacgaaattgcaaggaaaatgaataggtacttgtttgagaaaaaagcctggaagaatgaagagtttttcttcgacgggattgactgtgaatggttttttagccacttcttctaccgccttctatctgcaaagaaatctatgtggcttttaccattgaatgtggaactatggccatatattaaagaagcgcaattgtcccgcaatgaagagtctttaatgaagaaatga

SEQ ID NO: 67 - DNA, 909 bp, Saccharomyces cerevisiae
atgactgttataaagacagaaccaacaacagaagtgacattatattctccaccatcaaaagaatctttaagtaaagatgacgcccacagaaaaaaacaaaataataaaccaccttcgagtataaatagccgctcaggaccaaataagcataaacttgccgccaaagcaccggaaaagaaaatcaataacacagataaacaagacctctctgcctttttattaaatccttcccttattgttaaaccttctgagagcaaaaaaaaagaaaatattgtggcctataatgatacaccaggtataaaaacagaacatacagcgtttcagccgctgacaccaatttcgaaaaaaagggccctgaaagagaaagcagcatcagaaaaatgtgatagctttgatctttccagagacgagaagccttatattcagaaaaagtcaaagacgctttcttccgtcacagagattaattcctcagaatataaactctcactaaatggcgaaaatacatcatccccagctaaggaaaaatcgcaagaacccatagaaaatcctggaagttaccaaaaaacaagaaattacctttttgaaaagcccgatcctttagacacgtgccttcaggactactcgagtatgctaccgtcaaatgtagcagaagaagatcaagaatattttatcagcgtagctgattcgacattggaggagtggactaacaagggccaggaaattattgaccaacagttccagctctaccaagaaataatcaagaaacgaatagaactaagctacaaatttaagggtattatttctgtaatcaatgatagggcagatgccctagaagaacagggtcaacaactagaaggaaaaattaagaaagttaaaactttggctaatgaaattctcaatattatataa

SEQ ID NO: 68 - DNA, 327 bp, Saccharomyces cerevisiae
atgatttatatgttggtttttctggatcgtcaacaactcgtgcatatttttttgtttcgaagtagaggaaccacaaatattattaaagcgtgttatttttttttcttactcttctgtaaacttctaaatgctgctgaggcacccctactagcaatttccctatcaaagtttgtttggctgttattaagggtatgtaagacctcgtatctgctgctactgatcaccatgttagaaggagcagaatacttttctctcgtagttgggaattccatttgcggaagtggaggtgaaggtgttggctgtcgatatcctgttgttttgatttga

SEQ ID NO: 69 - DNA, 675 bp, Saccharomyces cerevisiae
atgtgggattcgttaattgtaagcatcaacgatacgcacaagttggggctggaggattgtctcgccgtttttggccacgttcccattaccaaggccgtcaagcatgtcagactgacagagatcgacacgcagacgtccacgtttacgctcaagttccttcacacagaaacgggtcagaacatcgagaagattatctacttcattgacaatgacacgggcaacgatacccgcactgctaccggaatcaagcaaatcttcaacaagatgttccgcatcgctgcggagaagaggaagctgtcgctcatccagatcgacactgttgagtacccctgcactctagtagacttgttgatcctggtaggcgtggcgctaccgccattgtgctacctctatcgtcctgcactgcacgctatctttttcctggtccctaatcctgtgggctccaccttagaggcgtggctggatagtgatcttgtgctgcgactcatcattgttgccgagttcctgactcacgccctcgagacgctcattttcgtcgtccctaggctcaagtactaccgtgttcctggcgagttcgtgcccgagtggcttcttctaggtctcctcgaaggttacggtcctgcgagacgtctagatactaaggctcgcactcttggcgaagggtcagttaattag

SEQ ID NO: 70 - DNA, 1449 bp, Saccharomyces cerevisiae
atggatttttatactactgatatcaacaaaaatgttgtgcctttgttcagtaaaggaacagtagcaagaacagcatcaaaagcacagtatccatcatggtgcaacaacgcgttaaagttaactaatattcttcttaaatctcttcgatgtaaatttcaaacgaaccgctgcgaggatgatcgaggttttgaggtatattgtgttattttaaaaagcatcgctttattaatggccgcgaaagaatcattgatattactacaaatacctccttctttaccatcaggatttccatttcgttcaccccaactgtcatttacatatttatcaacccgtcttagtgggagccaacacaaatctacgcattctcatcacatcaatcatcaaactcatcccattcatagtagcagtagcaacagtaatagtaataaccgtattcctacaaaaacagattcctccaaacagcatacacagcatttctcttttgctaatgcgggagcctccaatagagacgaactgctatcaatcgtgcgcaaaattgataaatctaatttgaagtgttgtgactgcggtagcaccgcaacagtagaatgggtgtcaatcaatttattgtgtatattgtgtatcaaatgttcgggcgttcatcgatctctgggttcacatatctccaaaattagatctttaacgctggataatttcacctcgttagagttgatgcatcttttacaaaataatgtttccaatagtaatgttaatgccatttatgaaagcaatctcaggaactttccagttaaaaaaataactgcaaattctgatgactcggaaagatccaaattcattattgataagtatcaatttaaaaagtttgttatcgacagcaaccaaggcagagaggcttctttgaagtctttaattaaagctatccatttagatagtgttttcatgatgcaaagagccatcgcccaaagtaaatattccctaagagaattgacggcaagcgaaaaagagcagaatgatctaaaccattcttccatttttcaatattccctaaagcactatgaaattgttgatggaacgcccattttttttattacagaatttttattgtgcaatggtattcatatagataatttaccgaagattactacgaattggtctccaaaggttttagaatattgggaaactaagttggagatgtacggaacattccaagctgtaaatacttctcgtccaagatcagggccgcatttaaatatgcattcaaatgtagattcagcttcgtcctacaataagaaacacgatttgagagttaacatacctgaaagaagtgcctcagcaagtaaaaggtggagtttgagctccattcctaagtcttctcaaaatttgatgtccccaacaaacttattaacaatgcataagtctttaaaattggccaaaaaggacaaaaaataa

SEQ ID NO: 71 - DNA, 471 bp, Saccharomyces cerevisiae
atgccttgcttgttgccacctacccaggtaccagaagcgccttctatttctgcaaataatggagtgttgttttcgtccttcgctcttttatttatgtttttcaatagcttggcaatcagtttgggatctaaagagttatacagatcctcacgttcttgcacgatttgttcatcactcattccctgcagaactttaatattttcattatggatagattttgcctcggatagtggggcgtctgtactcgtttgttgcttttcagcatccttgccactagtttttttcttttgggctcttttttctcttagtctttccttccaagatgatattttcttgggtttgtacaactcgggaaatcccgttccacagttgttggtactaagagtgccattgtcattactttcaacagagtcagatgtatctttctccactatatcgcccagtaagtccattacgatggtggcagagtga

SEQ ID NO: 72 - DNA, 264 bp, Saccharomyces cerevisiae
atggacgcattgaactccaaagaacaacaagagttccaaaaagtagtggaacaaaagcaaatgaaggatttcatgcgtttgtactctaatctggtagaaagatgtttcacagactgtgtcaatgacttcacaacatcaaagctaaccaataaggaacaaacatgcatcatgaagtgctcagaaaagttcttgaagcatagcgaacgtgtagggcagcgtttccaagaacaaaacgctgccttgggacaaggcttgggccgataa

SEQ ID NO: 73 - DNA, 309 bp, Saccharomyces cerevisiae
atgagtctttctttccttctcttttccccttttctccccccctgtttctcgtccatctctatctgtctatctgtcttatctactgttagtttttttttcgctttcacgataccgcattacgtactgcgctgcggaagtgtggatgagtggcatatacactcttctgcagaggattttcgtacacaacggtgtgtgtgtgctgtgaagctgtctgcttccttacttggctgtttgcttgcttgtgcgtcatggtcacttttgttagaagtgagccgcataaaatggcatgtcggcacagcctacagttaa

SEQ ID NO: 74 - DNA, 2787 bp, Saccharomyces cerevisiae
atgaaggacagtgtagactgcccaagcattctacccaccgaccgcacttcagtgctttccgagactagcactttggtcggatcgagttcgcatgtatattcgaggcatgctcctatgaacagttatcataacagcatgaacagcaacatataccacagccccaaagccagtagccctttggtgagctataagacatcttcgccggtgttattgaagagggcgaccgctcctgtcctgccaagcttcaagcccaaggaacagcgatataataagccgcagggttgttcgctaattactgctgtagaactgggcaagattattgaaaccttaccagatgaaaaggtgctcttacttgatgttaggccgtttaccgaacatgccaaatccattatcacaaactccattcatgtatgtttgccttccacgctgctgaggaggaaaaatttcaccttttccaaactcttggacaacttaactcctagcgagcaaagcgtgttgaaatctaaactggccatcgataaccttcggattatcatttatgatagcaccgcaaatcaaacggaaagttctgtttctttaccttgttatggaatagcgtccaagctaatagagtttgatactaatgttaaaaaaaccgtgtctatactaatgtgtggttttcctcaattcaaaattctatttccagaccatataaacaccaacacatttaactcagattgcattagttcggctgaacctaaaagccccaagacaaaccttatgaacagtctacacaacacagcgccgcatatgacggcgacaacaccactatcgtctccgcaaatgaaccttaagttgaaagttcctgacgatagtaggtcagatcattcaaacttttccagttctccctctccgcgtaacgtcctatcagattctcccatgtcttcttcttcccccatatctgccttatttaagttccagctgcctgcaccacaaacaaacataaaccaaatgttcaaattttcgcaaaatgaagaaataatgggtttagagacgtatttgagtgcagtcaacatcaaagaagaacatgaaagatggtataataacgattctgccaaaaaatctttacaaaacttccaattcccaaagaaccaaaattctctagaaaaggacactaataaagacaaactagggtttcagatcagatacgaaaacctgagcaaaaattacgaaaaggaggtcattgactccgttatacctgaatggttccagcatctgatgtcaatacccaagatcgagttggtttctcagtttcaaaaattagattttttggaaaaaaggcgcttgaaccattctgtctctttcaggaagaaggaaaactcgtttatacttgaaaagccatcatcatatcctgaacagttaacatcaacttcttcttcaacaatcatgcctccaaaatttcctgacgtgaacaaagtacaaaagaggtcgcattctcagccaatcttcactcaatacagtaaatataaatcgatgctcagccttgaatcagattccgattcggagtcagatgacgttataatatcatcaggcgttgaattaggagccaagaacaggtacaaggatatttttccctacgagcattcgagagtgattctaaaaaaaggtttgcaatcatcaaaaggtatcaagcattcacattctacttccgatggtggcatcctcgacaattatatcaacgcaaactatttgtctctgccaaggttttctgtagagcaaaattcgtcatttcaaacaactacaaccacaacaagaagagtgcgctatatagcgacgcaagctccaatgccctccactgtacatgacttttatacatgcatattgaataatggcgttccgttggttctctcattgacaaatgatttcgaaaatggcattgagaaatgttatcgatattggcaagaaggtaattataacggtattcacgttaaattgttagaaaaaaaaatattaaagatgcctagcactactagcatgaggaaaaatactatgggaacacaaaatagtagtttatattcagctggtgttcagggaaatagtagtaactatagtactgataatgataatgataatgacaacaataataataacaataacaatagtaatattcctgttactgctgctgcttgtgatgatgatgatgatgatgatgatgacgcaattctcataagacaaattctgctaacatatcatgatcaagagaaaccttatgaattgttacagattcaggtgaaaaattggcctgatttgggcactttactcaatcctatctcaatcttacaagcaatcaatgtcaagaatcacataatagatacactatttgccagaaattactatcaaaacgaccaacttcctaccattttggttcattgttccgcaggttgtggaaggactggtactttgtgtaccattgattccattctatccaatttcgaaatgtttgaaatgttgcagaaagagtttgttaaattaaaatacccggcaaagttattcgatccaatttcatggacaattaatatttttagaaaggaacgaatatccatggtccagaacattaatcaatttattttcatttatgactgcttgctattttactttagattacgtcttgatgacataacagagagaacggatggtgatggaagtaacaaggacaatatatcattaagtgcattaattgaacaaatcgaaaaattagagatcttgcagacattcgtggatgataagttgaaagaattgccacaatag

SEQ ID NO: 75 - DNA, 522 bp, Saccharomyces cerevisiae
atgaatttcaaggagccgctagtgaattttttaaaatgcgtcttgaataacataaactcggcattttcgcataggattgatcaattgcaattgcagctgttgcgggaaacaaatatcttgagggttttgaacaggggaatagagagactgtttagcgagaatccaaggacccattctgtttcccgtatcgtggtggaaaaagatgtgggctgcagaattggacgatatgtggaaggttctaaatatgaactggtagagtccagggcgaaagaaatacaaatatattatgaaaggatggtttttgaaataacacaagaattgaaaggggacaagcgggtgtttgccttgattgcaaatctttcccaaagatatagcgcagagaggaaagaaatacgaaatgtaaaggtgcatggtgggcggccatgtaatgagaacgaattccaggtgattccgataagattcaaacctattaatttggaaagaagagcacgactgataagaaagaagaagactattaattaa

SEQ ID NO: 76 - DNA, 723 bp, Saccharomyces cerevisiae
atggccgatgaggaacgtttaaaggagtttaaagaggcaaacaagatagtgtttgatccaaataccagacaagtatgggaaaaccagaatcgagatggtacaaaaccagcaactactttccagagtgaagaggacataaaaagagctgccccagaatctgaaaaagacacctccgccacatcaggtattgttccaacactacaaaacattgtggcaactgtgactttggggtgcaggttagatctgaaaacagttgcgctacatgcccgtaatgcagaatataaccccaagcgttttgctgctgtcatcatgcgtattagagagccaaaaactacagctttaatttttgcctcagggaaaatggttgttaccggtgcaaaaagtgaggatgactcaaagctggccagtagaaaatatgcaagaattatccaaaaaatcgggtttgctgctaaattcacagacttcaaaatacaaaatattgtcggttcgtgtgacgttaaattccctatacgtctagaagggttagcattcagtcatggtactttctcctcctatgagccagaattgtttcctggtttgatctatagaatggtgaagccgaaaattgtgttgttaatttttgtttcaggaaagattgttcttactggtgcaaagcaaagggaagaaatttaccaagcttttgaagctatataccctgtgctaagtgaatttagaaaaatgtga

SEQ ID NO: 77 - DNA, 429 bp, Saccharomyces cerevisiae
atggcagatcaagtaccagttacaacacaactaccaccaataaaacctgaacatgaggtaccacttgatgctggagggagtccagtaggtaacatgggtaccaactcgaataacaacaacgagctaggtgatgtattcgacagaataaagacacacttccctccggccaaggtaaagaaaataatgcagacagacgaggatataggaaaagtttcacaagccacgcccgtaatagcgggcaggtccctagagttttttatagcgttattggtgaaaaaaagcggggagatggcaagaggacaaggaaccaagagaataaccgccgaaatactaaaaaaaacaattttaaacgacgaaaaattcgatttcttaagggaaggtctatgcgtagaagaaggccaaacacaaccggaggaagagagtgcctga

SEQ ID NO: 78 - DNA, 912 bp, Saccharomyces cerevisiae
atgtccacaactgattcggggttcgtactttaccactatacgccaagtaaagcggctgcaatcgtatttgtcgtactcttcattataatgacagtcatttttgccgttcaaactttatatgctgcgagaaaatcttctaaggcattgaaaaataatccatttgagtcatctgatgataaggtcgatagtcttgaggatgctgaatacaagcaactaaaaatcacacccacagtttttgcgtttatacctttcttcactggctgcatcatggaagctgtcgggtatatcgggagggctctatccagttccaatcctgaaagaacgaccccatatattatccaatctgttcttttattagtcgctccagcactaatagctgcgacgatttatatgatttttggaaggttattacatgttatgaggtgccaatctttaattttgatttctgcacgctttggtacgactttctttgttgtgggagatgtgtttagtttctttttacaagctgcaggtggcggactaatgtctaaggcaggatcaacgaagactggttcaggactcataactgcgggtctttttgtacaggtaattttttttggatttttcattatcaatgagataagattcacagtaaatgttaaaaggagatgcttattttacgaagatatttccagaaagtggatctttgtgaatgctaccctattattaagcagtatgttgatcctactacgttcaattgtccgaatagttgaatttattcagggattcaatggctatataatctctcatgagtatttcatatatgtcttcgatgctgtacctatgttattggtaataatagcatttagtgtgggatcctttttcggcaacgtattcgatgttataaaggagtgtcaaacgttaagtaattag

SEQ ID NO: 79 - DNA, 1107 bp, Saccharomyces cerevisiae
atgaaactggatagtatagacattacacactgtcagttggtcaaatctactagaactgctaggatttataggtcggatacatatgccattaaatgtctagcactagatttcgatatcccgccacataacgccaaattcgaagtatcgatattaaacaaactgggcaacaaatgtaagcacatcttacctcttctagagtctaaggctaccgataataatgacctattgttgttgtttccctttgaagagatgaacctttatgagttcatgcaaatgcactataaaagagatagaagaaaaaaaaatccctattacgatttgctaaatcccagtatcccaattgttgcggacccccccgttcagaaatatactaatcaattggacgtcaatcggtattctttgtcctttttccggcaaatggttgaagggattgcattcttacatgagaacaagatcattcaccgcgacatcaaaccgcaaaatatcatgctaacaaacaataccagcaccgtatccccaaagttgtacataattgattttggcatctcttatgacatggcaaataactcacaaacaagtgcggaacccatggatagcaaggtgacggatataagcacaggaatttacaaggccccagaagtgctttttggagtaaaatgctatgatggtggcgtggacgtgtggtcgttgttgataattatttctcagtggttccagagagaaacaagccgtatggggcacgttccggccatgattgatgacggcagcgacgacatgaactcagatggaagcgatttcagactgatttgctcaatattcgaaaagttgggcataccgtccattcagaaatgggaagaggttgcgcaacacggctcggttgatgcatttgttggtatgtttggtgcagatggcgatggcaagtatgtactggaccaggagaaagatgtacagattagcattgttgagaggaatatgcctcgactggacgagattgcggatgtcaaagtcaagcagaagttcattaattgtatcctggggatggtttcattttcaccaaacgaaagatggagctgtcaaagaatcttgcaagaattagaaaagccataa

SEQ ID NO: 80 - DNA, 621 bp, Saccharomyces cerevisiae
atgaatagcgagtacgattacctgttcaaactgctgttgatcgggaattccggtgtcgggaagtcctgtttacttttgaggttttcggacgacacatataccaacgactacatctccacaattggagtggacttcaagattaagactgtagaactggacggcaagactgtaaagctacagatttgggacactgcaggtcaagaacgtttccgtactatcacttcatcttactaccgtggttcgcatgggatcattatcgtgtatgatgtcactgaccaagaatccttcaacggcgtgaagatgtggctgcaagagattgatcggtatgcaacctcaacagtgttgaagctattggtaggtaacaagtgtgatttaaaggacaagcgtgtcgtggaatatgacgtggcaaaggaatttgcggacgcgaataagatgccgttcttagagactagtgctttggactccaccaacgtcgaggatgcgtttttaaccatggctagacaaatcaaggaaagtatgtcccaacaaaacctgaacgaaaccactcagaagaaggaagacaaagggaacgtcaacctgaagggacagagtttaaccaacaccggtgggggctgctgttga

SEQ ID NO: 81 - DNA, 1629 bp, Saccharomyces cerevisiae
atgatttcacccataagctttctatcatcgctgctatgcttaacttatctaacctcagctttaccgattcttcctaagagagaagttgtaacgagagttcacacagcaagcacaactaatgttgtgactgatttttactccactactaccgaagttgttattgccccaactgtcgaattcctaataagcgatagtgttacctttacaacaaccttaattccacaaggtgtgaacccaacagctgaaccaactacgactatcactaaagttctcttaaaaaaggctgaaatgagtacatcttcgcagccaacctctactttgcagccaagcactattccacaatcaacctcctcttttcaagcagaatctactttgcaagccgtctctacgcaacaaactgctatgtctgtttctgcaggtactagtgaggatgtgcaacaattagctactacttctacctctatctcctcctctccttcccctaccactacgtctacttccacacaaaatatcgtgagtggtgtcggtgaagccaatgttgaaggcaacactcaaagtcagcatcattcttaccaagcagctgcgacttcaactttgaatcaacaaacgagtacctcaattgcttctcaggagtccaccgaatcaaccaatacacctacgtcgtcctctacgtcgtcctctacttcttcttctacttcttcttctacttcttcctctacttcttcttctacttcttcctctacttcgtcctctacttcgtcctctacttcatccacacaggaaacagccgctaccacctctgaaggttcctctagtagcagcgctgctataacttcttctccaaaggctattgcatattcaccatataatgatgatggctcttgtaagtctgcagacgctgtctcttctgacttaacgttgatcaaatctaaaggtatttccaaaatccgtgtttatggcaccgactgtaattcctttgaaaccgtccaaccagcagccgtaaaactaggtattaagattaaccaaggtttgtatatcaccagtagcggcgttgattccatagatgattctgttaccacattgattcaatatggtcaaactaacggttgggatgtctttgatttcattactgttggaaatgaagctatcaataatggttggtgttcagtttctgatttgattagtaaaatttcctctgtcaaatccaaattaagcgaagctggctattctggccaaattactaccagtgagccccctgtctcatttgaaaataaccctgatttgtgcaaaaaatctgatattgacttcgttggtatcaacccacatgcctactttgatactagcgccagtgctgaaactgccggtacatttgttaagggtcaagttgaattaattcaaggtgtttgtggtacttctaatgttttcgtcacggaaacaggttacccatcgtctggtattcaaaatggaggcaacattccatccactgctaaccaaattactgcagtccaaaacatcttgaatgaaatggacttggatgttacaatcttatcgacttacaatgattactggaaggctcccggtgattacggtatcgaacaatctttcggtgtgattgaatattttccataa

SEQ ID NO: 82 - DNA, 1740 bp, Saccharomyces cerevisiae
atgaatagggacaacatggacacaacaaagcgcaaagaagatcatacaaagcatactactgatgtaatagaattttacgaagaaggaaccgcagcttcttctttaaacatagccacagaaaaggccaactcaagtccgtccattttgagaagaattatcaacagggcggcatggctttctaagaaagtggacgcaatgggagtagagtctaccggtattcagaggatatctccctatgaacgaggaacatcaaagaaacaatttttgcatgtcgcggggctatggttgagtgccacaggtggtttgtcttccatgtcgtcgtttttattaggccctctgcttttcggtttaagctttagagaatccgtagcctccagtttaatatcggtaacaattggttgcttaattgctgcctattgctcgatcatgggaccgcagtccggttgcagacagatggtaacagctagatacctgttcggatggtggtttgttaaattagttgcattagcttccattatcggtgtcatgggttggtctgtggttaattccgtggttgggggtgaaatgttagctgctatttctaatgataaagtacccctatgggtagggattgtcatagtgaccgtatgctcctttttagttgccattttcggtatcaaacaagtcattaaagtggaaacttacttatccgtacccgtcctgacagcatttttactactgtacatttcatcaagtgataaatacagcttcgtcaatgcatacgtttcaaagggaaatttggactcttccacccgaaagggcaactggatgagttttttttcattatgctatagtattacggctacttgggggtctattacagcagactattatatattgttcccagaagatacaccatatattcaaattttttgcctaacgttttttggaacatttttgcctacctgtttcgtcggaatcttaggtctcttactagcttctgttgccatgtcgtataagccttggtcagtcgagtacgattcccatggaatgggtggtctactttgggcaggttttcagcgttggaacggcttcggaaagttctgcgtggtagtactggtattcagtttggtatccaacaacatcatcaatacgtattcggcagcattctccatccaactttctagtgtgttttgtgcaaaaatccctcgctggttctggtctattgtttgtactataatttgtttggtatgcgcattaataggtcgtaatcattttagtactattttgggaaatttcctaccaatgataggctactggattagcatgtactttatcttattattcgaagagaatttagtattcagaaggtttttcttacatttgtacaccaaagagtttcctacagttacaggagaaataaatggaccggaacttgttggatcttcaaaagaagtggagaaagatgcagttactaatatccatttgttaaaaagaaaacataaggtgactaaacatcgttacaattgggacaaatgggaagattatgaggttttaacgcacggttatgcagcaacatttgcgtttattgtaggagttgctggtgtggtagttggtatggcgcaagcctattggattggcccaattgctgccaaatttggtgaatatggtggtgatgtcgcaatgtggttaagtatggcgttctcaggtgttgtataccctccttgtagatacttagagctacgtaaatttggtcgttaa

SEQ ID NO: 83 - DNA, 498 bp, Saccharomyces cerevisiae
atggaagaagtgaaagcagtcaattctgccgctaaagttttgtgctctgtggatcctcagtttgatccttctaaattaacactttctgtgggcgctactccgacttccaattctttgaaactcgataataaaagtacccttgttaaattcattactactcaattagttagtacgcttgaaatccactgcggtaattactgcatgtatgacctgcaacaggtggcaacaggctgtgtccaagatcacgaattgtctggttttgtattaggaacagtactatcatcttacccttctagaggtgaattgttgagtaatacaggtgtaatgtgtctaacgcgagaagcatcctcaataaaagggtttggaatatgtgctgatttggaacatgtgttaaaatccgagagtttcagtagggaatggtatgtagcaagggtctctcaagaacacgggatactgaggccaataagaaactggaacgaaactactccattaaattag

SEQ ID NO: 84 - DNA, 342 bp, Saccharomyces cerevisiae
atgagcattctatcatccacacaatccacaattttacgtataccctccggtctaattacttttctcctcagcaagctatttcttttgctccgcgtagaaccttcttcagcgtctatgtctatatcggagtcggagttattactcatgggtaatattaacgacgaatcccccaaaccgggaaagttagcttctgcaccactagcttcattgaccaatcttgttttttccattgacgtaaagggccttactcttatagctacgactatggaggattgtcttgtttcaggcacgttcatgttagtgtcaatagtatacagctggaaagaaaactcaagtagttaa

SEQ ID NO: 85 - DNA, 660 bp, Saccharomyces cerevisiae
atggacctagatctagccagtatcttaaaaggtgaaatttctaagaagaagaaagagctggccaactctaaaggtgttcagccaccatgcactgagaaattccagccacatgaatccgcaaacatagacgaaacaccgcgacaggtagaacaagaaagtacagatgaagaaaacctgtcagacaatcagagtgacgatattaggaccaccattagcaaattagaaaatcggccagaaaggatacaagaagcgatagctcaagacaaaaccatctctgtaatcattgatccatcacaaattggttctactgaaggaaaacctcttttgtcaatgaaatgtaatttatatattcacgaaatattatctcgttggaaggcgtctttggaagcttatcatccggagctgttcttagacactaaaaaagcactctttccactcctactgcaactacgaaggaaccagcttgccccggatttacttatttcccttgcgaccgttctctatcatttacaacaacctaaagaaataaatttagccgttcagtcctatatgaaactcagtatcggcaatgtggcctggcctattggtgttactagcgtagcattcatgctcgtagtgcacattcgaaaattcaaggaggccggaatgctgctaacataa

SEQ ID NO: 86 - DNA, 3468 bp, Saccharomyces cerevisiae
atgaatagtaatgaactggatctaagaaataaatatttttatgagatattcggtaagaaaagaaaatcagatacttcaacccctactcagttgttctccggctccaaagttcagacaaacatcaatgaaatttctatcactaacgatgaggatgaagatagtactgaagatgaaaataaggcttcattgaaggattatacactagggcacgacaccggtgcacggtataggatagcaccggactgttcttcccaccaattaaaggcatctcctgtcctacatatttcaacaaaccttaattcaagtccacaatccttcacaggcgatcagatttcacctactaataaaaaaatttcaataaatgattcgaccagacaagataaaggtaacagttgcactaccacttcatcaccttctcaaaaaagatcgaatgttttgcttcctcacgtaagaaaacattcatctccttcactattatcattttccaaaaacagtggcagtcatatgggggatccaaaccagctatctacgcctccaactcccaaaagtgcaggtcacacgatggagttacacagttcattcaatggaaaacatagttcttctagcacctcttctttatttgcattagagtcactgaaaacccaaaatagacgctcatcaaactcttccaatcattctagtcaatatcgacgccatactaatcaacaccaacgtcatcattcaaggtccaaatcaagtcctgtctctctgacggaaatatccatgatcaaaggcacgcctttggtttatcctgcacttttatcactaatagcaattaaattcaaacagaccatcaaattgagcacgcataaaaagatggggttactttacagagattcctttacaggaaaacaagcaattgatactttatgcttgatcataggaagcttagatcgtaatttgggcatgttgatcggaaaatcgctggaagctcaaaaattgttccatgacgtactttatgaccatggcgtaagagattctgtactggagatttacgagttatcttcagaatcaatttttatggcacatcagtcgcagagttctacttcaattgccaacacattttcttcatcatcttcttcagttaattcgctccgtactaaaactgaaatatatggtgtttttgtcccattgacacattgttattcctctacatgctctctggaaaaactttgctactctatttcttgccccaatcgtttgcaacaacaggctaatttacatttaaaattaggtggtggtcttaagagaaatatttcgttagcactcgataaggaggatgatgaacgaatttcctggacaaattctgtaccaaagagcgtatgggaatcattatccaaacaacaaatcaaaaggcaggaggcaatatatgagttgtttactacagaaaagaagtttgtaaaatctttggaaatcatccgagatactttcatgaagaaattattagaaacgaatattattccatctgatgtaaggataaattttgtaaagcacgttttcgcacatatcaatgaaatatattctgtcaatagagaatttttgaaggctttagcacaaaggcaatcattaagcccaatttgtcctggaattgcagatatatttttgcagtatcttcctttctttgatccttttctgtcatacatagcatcaagaccatacgcaaagtatctaattgaaacccaaagatcagttaatcccaattttgctcgttttgacgatgaagtgtctaattcttccctgaggcatgggatcgattcattcctatctcagggtgtttcaagacctggtagatattcactgttggtaagagaaataatacacttctcggacccagtaacagacaaagatgatctacaaatgctaatgaaagtccaagatcttttaaaggatctaatgaaaaggattgatagagcaagcggtgcagcacaagatcgttatgacgttaaagtgttaaagcagaaaattctattcaaaaatgaatacgttaatctgggtttgaataacgaaaaaaggaaaatcaagcatgaaggtttactctcaaggaaggacgtgaacaaaacagatgcgtccttttcaggagacattcaattttacctactcgacaatatgctattattcttgaaatcaaaagctgtaaacaagtggcaccaacacactgtatttcagagaccaattccactccctttactgtttatttgtccggctgaggatatgccacccataaaaagatatgtgacagaaaacccaaattgctcagcgggtgtgctcttaccccaatatcaaacgagcaatcccaagaatgctattgtattcgcctattacggtacgaaacaacaatatcaagttactttgtacgcgccgcagccggccggattacagacattaatagaaaaggtgaaacaagagcaaaaaaggctccttgatgaaactaaacatattacttttaagcaaatggtaggtcaattctttcactcatacataaatactaatcgcgtcaacgatgtcctaatctgtcatgctggtaaaattttattggttgcaacaaatatgggactctttgttcttaattatgctacatcgatcaatcaaaaaccagtgcaccttctgcacaaaatatcaatttcacagatctctgtattggaagaatataaagttatgattcttctaattgacaaaaaactgtacggctgtcctttagacgtaatcgacgatgcagaaaatgcagattttcttttcagaaaaaattctaaagtgttatttaaatatgttgcaatgttcaaagacggtttctgtaatggtaaaagaatcattatgattgcacatcattttttgcacgccgcacaattattgattgttaatcctttgatatttgattttaatagcggtaattttaaaaaaaacctaaaggcaggcttggtagattttagcgttgattctgaacctctgtccttttcttttttggagaataagatctgcattggttgtaaaaaaaatatcaaaatattaaacgtaccggaagtgtgtgataaaaatggatttaaaatgagggagcttttaaatctacatgataacaaagttttagcgaacatgtataaagagacgttcaaagtagtttccatgtttccgataaaaaattcaacttttgcatgttttccagaactctgcttttttctcaataagcaagggaagagggaggagacaaagggatgttttcattgggagggggaaccagaacagttcgcgtgttcctacccttatattgtggcaattaatagtaactttattgaaattagacatatagaaaatggagaacttgtccgctgtgtacttggaaacaagatacgtatgttaaaatcatatgccaagaagatcttatattgttatgaggatcctcaaggatttgaaattatcgaactgttaaatttttga

SEQ ID NO: 87 - DNA, 1203 bp, Saccharomyces cerevisiae
atgacagcctcatcaaatgacgatgacctaatattcgaatgttatagcgatcctgagttaaaaagatggacacaccttgctaatgcaaaagcttggaaaggtattctgaccgtgcagcagtacgctgatagggaacaattgctagggtcttcagagatttctcaaaagaataaatcaaatgaaatgatgacaaaatacccaaaaagttaccagtggcttgggcagaagtactttgttttaaaggatcgatctttgccagataatggaaaatttagtcaagttgtttccagttgcgaaactttaaacaggattggatattgtattcatccgggttctaatggaaaaatcgagccagctttgattgtatgcattgggggcgtctttacctttgaaaaccatcgcggcaagggctacgccaagaagatgattatcaaactgaatgaattttatgacaagattcgtgatgacgctaacaccgtactagaattgaaaaatttggtgattaacctttacagcgaagtcggagaatattattccgcattaggatacgagagtatgcatgttcccttgcaccgcatttctaaattagatgaacttactgagagatactgtggagaagatgatgaccatgatggtaagtacttgggatttgatgattacaggggtttagtaggactacatgagacacagttcaaagaaagcttattaagtttacacaaagaaaacccagagaagtttgtttttaccgttgcgccagactttgacattttcacatggtttcagtatcgtgatctttttatcatgaataaatcaggaagaaaagcccagcaaaatctgttttttggatacgcgttgagtgataacagccacatcatatggcatcacaattggaacggtgattctctgattattgtcaaaatccatatacctgaagaaacatttcaaaggaaagaattgaagctcaaaaaattactaaggaaggccatagaagagacaaagcttcatggattgcaagaattagaattttgggacgaagaaattcccatcaaaaagtacccacaattgtttcagttattaacagagcttgaaaatgaatctaaagttttctcagaaaacggttccatcagtgctgttcgtccccccaaaggatatacagccgagcaggtaatttgggataacaataccaaattctgttggttttaa

SEQ ID NO: 88 - DNA, 354 bp, Saccharomyces cerevisiae
atgtctcgccaaagcgcattcaaatttcagaatggaaatagacacgaacgagcctgtctgtcagatgttcacaaaatccttattataattttatattctactaaaggaaaaagagaattaggaaaaagaataactcattttatgtatatacatatattttgtacatatctataccaagcaagtatagtgcaatactgttcttcgacgttattaaacgtaatagcattttcttggtatcctttgaatcttatatacaagtacgagtacatactgcgcagtaaattgatcctgatggtgtgtttagatttcgccagaagcggaggcgttctggattctggagatgtaagcctttga

SEQ ID NO: 89 - DNA, 282 bp, Saccharomyces cerevisiae
atgtctttcttaggtttcggtggtggtcagcctcaattatcatctcaacaaaagattcaagctgcggaagctgaactagatttggtcacagacatgttcaataaattggttaataactgttataaaaaatgtatcaatacttcttattccgagggtgagctgaataagaatgaatcttcgtgcctagacagatgtgtggccaaatattttgagaccaatgttcaagtcggtgaaaacatgcagaaaatgggccaatcatttaacgcagccggtaagttttag

SEQ ID NO: 90 - DNA, 1296 bp, Saccharomyces cerevisiae
atggcagactttaaatctttaggtctttcaaaatggcttacggaatccttaagagctatgaaaattactcagccaaccgctatccaaaaggcttgtattcccaaaatcttagaaggaagagattgtattggtggtgccaagactggttctggtaaaactattgcatttgcagggcctatgctgactaaatggtccgaagatccgtcagggatgtttggagtggtcttgaccccaaccagagagttagccatgcaaattgccgaacaatttactgcacttggtagcagtatgaacattcgcgtgtcagttatagttggtggtgaaagcatcgttcagcaggcattggatttacaaaggaagccgcactttattattgccacgcctggacgtctggcacatcatatcatgagcagcggagatgataccgttggagggctaatgagagctaaatatttagttctagatgaagccgatattttgctaactagcacgtttgccgatcatttagcaacatgtataagtgctctacctcccaaggataagagacaaacacttctattcactgcaactataacggaccaagtaaagtcgttacaaaatgcaccagtgcagaaagggaaacccccattgttcgcttaccaagtagaaagtgtagataatgtggctattccatcgacgttgaaaatagagtatatcttggttccagaacacgtcaaagaagcatatttgtaccaattattaacatgcgaggaatatgagaataaaaccgctataatatttgtaaatagaacaatgaccgcggagatccttagaagaaccctgaagcagttggaagtgagggtagcgtcgttgcactctcaaatgccccaacaggaaagaacaaattccttacatagatttcgagctaacgctgcaagaatcctcatcgctacagatgtagcatccagaggtttggatatcccaactgttgagcttgtagtgaattacgatataccttcagacccagatgtattcatccatagatctggtcgtacggcccgtgctggcagaattggtgacgccatatcattcgttacccagcgagatgtttctaggatacaggccattgaggaccgtatcaacaagaagatgacagagacaaacaaggtacacgataccgctgtaataagaaaagccttgaccaaggtaaccaaggcgaagagggaatcgctgatggcaatgcaaaaggaaaacttcggtgagagaaaaagacagcaaaagaagaagcaaaatgacgggaaaagtttgcgctcttga

SEQ ID NO: 91 - DNA, 786 bp, Saccharomyces cerevisiae
atggctagaggaccaaagaagcatctaaagagattagcagctccacaccattggttattggacaagttgtccggttgttacgccccaagaccatctgctggtccacacaaattgcgtgaatccttgccattgattgtctttctaagaaacagattaaagtatgctttgaacggccgtgaagtcaaggctatcttgatgcaacgtcacgtcaaagttgacggtaaggttagaactgacaccacctacccagctggtttcatggacgtcatcactctagatgccaccaatgaaaacttcagattggtctacgatgtcaagggtagattcgctgtccaccgtatcaccgatgaagaagcctcttacaaattgggtaaggtcaagaaggtccaattaggtaagaagggtgttccatacgttgttacccacgatggtagaactatcagatacccagacccaaacatcaaggtcaatgacactgttaagattgatttggcctctggtaagattactgatttcatcaagttcgatgccggtaagttggtttacgttactggtggtcgtaacttgggtcgtatcggtactatcgttcacaaggaaagacacgatggtggtttcgatttggttcacatcaaggactccttggacaacactttcgtcactagattgaacaatgtcttcgtcattggtgaacaaggtaagccttacatttctttgccaaagggtaagggtatcaagttgtctattgctgaagaacgtgacagaagaagagctcaacaaggtttgtaa

SEQ ID NO: 92 - DNA, 393 bp, Saccharomyces cerevisiae
atgtgcctaggtaagctgtacttcgaacagctaatattagtaagatgcataaaggggcgtcaaagtggaaatataacgacaggagaatctcggtgtgtaagttggaatgtgtattgcaccacttccatgattgggcttttttcctggcgcaaaatgttgctttttcaacatttttcttatacgcagagagagaatcgtcagataggtggtaaaacttggagcctaattagctcattatttcatttgaacgagacattggcttctgccctacatcacccatacgagacattggccttatacgaggcgtacttcgcttgcgggaaaaaaaatttcttttgtaagcgaggttactcagaaactgtgactgaaggcagaggttggaaacgtgtgtag

SEQ ID NO: 93 - DNA, 1923 bp, Saccharomyces cerevisiae
atgaggagagagaggcaaaggatgatgagtttcgaggacaaggacaaggacgaccttgacaatagtaatagtaataacagcagtgaaatgacagatacggcgatgatgccaccattaaagagattgcttattacgggcagtagcgatgatttggcacaaggatcatcgggtaagaagaagatgacgatggcgacgaggtcgccatcgtcatcacccgatttggcgacaaacgacagcggcactagggtacagccattgccagaatataacttcaccaagttctgctatcggcataacccggacattcagttctcaccaactcatacagcgtgctacaagcaggatttgaaacgaacgcaagagattaatgctaatatcgcgaagctacccctgcaggagcaatccgacatccaccacattatctcgaagtacagcaattccaatgacaagatacggaagctgattctggatgggatcctatcgacgagttgcttcccacagctttcctacatttcgtcactcgttacacacatgatcaagatcgacttcatcagcattctgccgcaggagctgtcgctgaagatcttgagttatctggattgccaatctctttgcaacgccacgagagtgtgccgcaagtggcagaagctcgcggatgacgacagggtatggtaccacatgtgcgagcagcacatagacaggaaatgtcccaactgtggctgggggctgcctcttttgcacatgaaacgtgcgcggatacaacagaatagtacaggatctagcagcaacgcagatatccagacgcaaactacgcgaccttggaaagtcatctacagagaacggttcaaagtggagtcaaactggagaaagggccactgcaggattcaggaattcaagggccacatggatggtgtgttaacgctccagtttaactacaggcttttgttcacaggctcgtacgactccaccataggtatatgggacttattcacggggaagctaatacgaaggctcagcggccattcggacggcgtcaagacattatattttgacgatagaaagctgattacgggctcgctcgacaagacgatccgtgtttggaactacataaccggtgaatgcatttccacgtatcgaggccactcggatagcgttctgagcgtagattcataccagaaggttatcgtttccggcagtgctgacaagacggtcaaggtatggcacgtggagtccaggacatgctacaccttgagaggccacacggaatgggttaattgcgtcaaattgcatccgaaaagcttttcatgttttagttgcagtgacgataccacaatccgaatgtgggatatcaggaccaattcatgcctaaaagtgttcaggggtcatgtagggcaggtgcaaaagatcataccgcttaccattaaggatgtagagaatctagccaccgacaacacttctgatggcagctctccgcaggatgacccaacaatgactgatggtgcagacgaatcagacacaccgtcgaacgagcaagaaactgtcttagatgaaaacataccttatccaacacatctactatcttgcggactggataacacaatcaaactatgggacgtcaaaaccggtaaatgcataagaacacagtttgggcacgtggaaggtgtttgggacatcgccgctgacaacttcagaattataagtggttctcacgacggaagcattaaggtctgggacttgcaaagcgggaagtgtatgcacacgttcaacggtcgaagactacaaagagaaactcagcacacacaaacacaatccttgggtgataaagtcgcccctatcgcttgtgtttgtattggagattcagaatgctttagtggtgatgaatttgggtgcgtaaaaatgtacaaattcgatctcaatgattag

SEQ ID NO: 94 - DNA, 366 bp, Saccharomyces cerevisiae
atgaatttctccacagtttttcaagcaataatcgcggttttaggtttaactacagtcacagctttagcagaatttgatttcgacgtaggctatgaagagtttgtccgtaccaatcctgatacgattttcttagagagtgatattggcctgcacgttggatataccgagggtggcgaacgacagatagcaacgataccacacaattccacgctagggacttcactacgtgagtatagtggctgtggtggtaatggtacagaaacctccatcgctacccccgcacctacaatgagtgaggtacctatcgctaccttcgtgaaacgtagaaaaagtgtacctatcttgctaccgcaggtatgtatgtga

SEQ ID NO: 95 - DNA, 1011 bp, Saccharomyces cerevisiae
atggccaggaaattgaagggtaagattgggagtaaaggcctaaaaggtgcattattaaggcacaaggccaaagtgaaattagtgaggaatattgaaagtaagcaaaaacatgaactaagaaagaaaaattcgagcgctaataacaaaaccgtgaagagaaaccaagaattccaaaaacttaatcaagggaaggttatgccctttgagaaggatgaaactttgatgctatgtggtgaaggagatttttcttttgccagatccattgttgaacaaaactatattgaaagtgacaatttaatcataacaagttacgataattctgtgaatgagctgaaattgaaatatccgcatacttttgaggaaaattaccagtacttaaaagatctaaatattccgatatttttccagattgacgttacgaagctcgtaaagagctttaaaatttccaaaaataatacttggtttaaaataatcaacaggcttagcgatcatcgttggggtaacaaacctttacaaaatatagttttcaattttccccataatggaaaaggtattaaggatcaagaaagaaatattagagagcatcaggacttaatttttaactttttccaaaattccttacaattatttaatcttataaacacgaaaattcaaaatgatactcttcgttatacgcaaggctatgatcttaatgaggatactccccaggctaaaaaattgaccgccgaaggttatggtaacatcatactgtcccttttcgatggagagccctatgattcatggcaaatcaaacttttagccaaaaaaaatggactaactctgagcagatcgagcaaattccaatgggaaaattttccaggatatcatcaccggagaacgaatagcgaacaagatactacaaaacctgcgaaagaacgtgatgctaggttctacatctttagtaaatatgtctcgaatagttcaaaacataaccgtaaaagcaaaaaagacacagattctgattcagactaa

SEQ ID NO: 96 - DNA, 354 bp, Saccharomyces cerevisiae
atgtatatatatgttgaagtgtgtacacacgtacacgcacaagctacagacgccacgcggcccggcattcatatatgtacatacatttatgcacatatatatatatatatatatgtatatgtaaatgtatatatacagcttgtgatttcgcgcgccgaatgggctgaaaagcacagtatagtggagaagaagagagaggagaaggggagaggggcaatagcaatggatgtggtagaatacagggaaggccaagctgttgttcaatggatgcggttcgaggcccagcgcaaggggggcgcttcgaagcatagaacattatccgcggaaacgggtattaggggtgagggtgaataa

SEQ ID NO: 97 - DNA, 3099 bp, Saccharomyces cerevisiae
atgacaccagacgaactaaattcagcagtcgtcacctttatggccaatctgaatattgatgattcgaaggccaacgaaaccgcttccacagtaacggattctattgtacaccgatcaataaaattgctggaagttgtcgttgcgttgaaagattattttctttcagaaaatgaggtagaaaggaagaaagcgttgacatgtttaaccactatcttagcaaaaactcccaaggaccacctctccaaaaacgaatgctcagtaatatttcagttttaccagtctaagcttgatgatcaagcgcttgcaaaagaagtcttggagggcttcgccgcattagctccaatgaaatatgtctccattaacgagatagcccaacttttgagattattattggacaactatcaacaaggccagcatttggcatcaactagactgtggccatttaaaattttgagaaaaatatttgatagatttttcgtcaatggatcctcgaccgaacaagtcaaacgaatcaacgatttgtttattgaaacatttcttcatgttgccaatggtgaaaaagaccctagaaatttactcttgtcatttgcacttaataaatctatcacatcgtccttgcaaaacgtggagaattttaaagaagacttatttgatgtcttattttgctatttcccaatcactttcaagccaccaaagcatgatccttacaagatctccaaccaagatttaaaaacagctttgcgatcagcaattactgcgacgccattatttgccgaagatgcttatagcaatttgctggacaaactcactgcttcttcaccggtagtgaaaaatgatacacttctgacgctattagaatgcgttagaaaattcggcggctcttctatattggaaaattggacgttactttggaacgctttgaaatttgaaattatgcaaaacagcgaaggaaatgaaaacactctactaaatccgtacaataaagaccaacagagtgatgatgtgggccaatatactaactacgatgcttgcttgaaaattattaatctaatggcattgcaactatacaattttgacaaagtatcatttgaaaagttcttcactcatgtattagatgagttgaaaccaaattttaaatatgaaaaggatttgaagcaaacctgccagattttgtccgctataggtagtgggaatgtcgagatatttaacaaggtcatttcgtcaactttccccttatttttgatcaatacatctgaagttgccaaacttaagctgctgattatgaatttttctttttttgttgactcgtacattgatttgtttggaagaacatctaaagaatcgttgggaacaccggtgccaaataataaaatggctgaatacaaagacgagatcataatgattttgagcatggccttgacaagaagctccaaggcagaggttaccataaggactctatctgtgattcaattcacaaaaatgattaaaatgaagggctttttaaccccagaggaagtttcactaattattcaatacttcacggaagaaatattaacggataacaacaaaaacatttactatgcttgtttggaagggttaaagacaatcagtgagatatatgaggatttagtttttgaaatatcattgaagaaattattggatttgttacctgattgcttcgaggaaaaaattcgagtaaatgatgaggaaaatattcacattgaaacaattttgaagattattcttgatttcaccacttcgagacatattttggtcaaagaaagcattacatttttagcgacaaaattgaatagggtagctaaaatttcgaaatccagagaatattgctttctacttatttcaaccatatattctctttttaataataataatcaaaatgagaacgtgctaaatgaagaagatgctcttgcactcaagaatgccattgagccaaaattatttgagataattactcaggaatcggccattgtaagtgacaattacaatttgacacttctatctaacgttcttttcttcaccaatttgaaaattccacaggctgcacaccaagaagaactagacagatataacgagcttttcatttctgaaggtaagataagaatcttagacacaccgaatgtattggctatttcatatgctaaaatattatccgcactaaataaaaactgccaattcccccaaaaatttacagtgcttttcggaacggttcaactactcaaaaaacatgctccaagaatgacggagactgaaaaattaggatacctggaattgctgttggtcttatcaaataaattcgtctctgaaaaagatgtgataggattattcgattggaaagacttatcagtaattaatcttgaagtgatggtttggttgactaaagggctgataatgcaaaactcattagagtcatcagaaattgcaaaaaagtttattgatttactgtctaatgaagagattggctcacttgtatcgaagctattcgaagtttttgtcatggatatcagttctttgaagaaatttaaaggtatcagttggaataataacgttaaaatcttgtacaaacaaaaattcttcggtgacatttttcaaacactagtcagcaactataaaaataccgtggacatgaccattaaatgcaattatttaactgcattatccttagtgttgaagcatactccaagccaatcggttggtccttttatcaacgatttattcccgcttttattgcaggctttggatatgcctgatcctgaagtaagggtatccgctttagaaactctgaaggacactacggataaacatcacactttaattactgaacacgtaagcacaatagttccattattactatctctttcgcttccgcacaaatataatagtgtcagtgtcaggttaatagccttacagcttctagaaatgattacgactgtagtacctctaaactattgtttgagctatcaggacgatgttctaagcgctttaataccagttttatctgacaaaaaaagaataataagaaagcaatgcgttgacacaagacaggtttattatgaattaggccaaatcccgttcgagtaa

SEQ ID NO: 98 - DNA, 1629 bp, Saccharomyces cerevisiae
atgtccgtacaaaaagaagaatacgatattgtagaaaaggcccaattatctgtgtccgcagaaagcttaacatcagattcggagagtatttcacataacccatttgacgattttcataaagcagagcgttggagaaaagtctatgaatccagtggttatgaaggcttgtctaaattcgatcctgagtttacatggacaaaggatgaggaaaagaaattggtaagaaaaatggacttgaagatttttttgtgggtttttattatgtttgcctttttggatttaataaggaaaaatattgcaagggcagtttcagacaacttcattgttgacttgaaaatgaacacgaacgactacaaccttggccaaactgtttatctagttatatttctagcaagtgaactacccggcaatctgctgtccaaaagatttggtccagaaagggtcattccggttcaaattgtgttgtggagtgtaatttgtattactcaagctggtctgaaaaatcgaggtcaatttattgctactagatgcttattaggaatggtacagggcgggttcatcccggacaatattctatacttgtcatattattatactggagctgagctcacattccgcctaagtttcttttggtgtgctatacctcttttccaaattttaggctctcttttagcttccggaatcatagagatgaggggtattcataacttagctggctggcagtacctatttataattgaagggtttctgtccctttctgttggcgtggcatccttttatttaatgcgtagaggacctacgcaaactggtgagtctgcatttcacaaaggaaaatcgttattcactgagtatgaggagaaaattatggttaacagaattttaagggatgacccatcaaagggtgacatgagtaaccgacaaccagttaccttcaaggagattttgtacactctaacagaatttgatctatggccattgtttatccaaggtattacagcattcatatctcttcaaacagttggttcctatttatctttgatattaaagagtttaaattactctacatttctttcgaacattttagcaattccaggccaagccctgctgctaataaatttaccattagcggcactattatcgcgtaaattgaaagaaaaatcactttgtgtgggaattgccaacgtttgggtgctccctttcatagtttctctggtcgctttaccgactgacacaaacccctggatcaagtatatattactaaccggtatacttggtcttccctatacacattccattcttgctggttgggtctccgagatttcaaattcggtaagatcgcgtacagtgggcacagcgttatacaatatgagtgcccaagttggagcaatcattgcttctaacatgtatagaaatgatgataaaccttactatactagaggtaacaaaatacttctaggattcacttgcttcaacatttgtatggctgttgctactaagttttactatattagtaggaataaatacaaggaccgcaaatggaactctatgacaaaagaagagcagatcaattacttggacacaactaaagataagggaatgaagcgtcttgattataggtttattcactag

SEQ ID NO: 99 - DNA, 1770 bp, Saccharomyces cerevisiae
atgactatttcttctgcacatccagaaacagaacccaagtggtggaaagaggccacaatttatcaaatttatcccgcaagtttcaaagactccaacaacgatggttggggtgatatgaagggtattgcctccaagttggagtacatcaaagagcttggtaccgatgccatttggatctcgccattttacgactcgccacaagatgatatgggttacgatattgccaactacgaaaaggtctggccaacctacggtacgaacgaggactgctttgccttgatcgaaaagacacataagcttggtatgaaatttatcaccgacttagtcatcaaccattgctccagcgaacatgaatggttcaaagagagcagatcctcaaaaaccaatccaaaacgtgactggttcttctggagacctcctaagggttatgacgccgaaggcaagccaattcctccaaacaattggaggtcttacttcggtggttctgcatggacgttcgatgaaaagacacaagagttttacttgcgtttgttttgctccacccaacctgatctaaactgggagaacgaagactgcagaaaggcaatctacgaaagtgccgttggatactggttagaccatggtgtagacggctttagaattgatgtgggaagcttgtactccaaggttgctggtctaccagacgctcctgtgattgacgaaaactcaaagtggcaactcagtgatcctttcacaatgaacggaccacgtatccatgagtttcatcaagaaatgaacaagttcatcagaaacagagtgaaggatggcagagaaattatgacagttggtgaaatgcgacatgctactgatgagaccaagaggttgtatacaagtgcgtcaagacacgaacttagtgagttattcaacttttcccacactgatgtcgggacttcgcccaagttccgtcaaaatttgataccatatgaactaaaggattggaaggttgcccttgctgaacttttcagatacgttaacggaactgattgttggtcaacaatttatctggaaaatcacgaccaacctcgttcaattaccagatttggtgacgattctcccaaaaaccgtgttatttctggtaagttgttgtctgtgttgttggtgtcactgagcggtactctatatgtgtaccaaggacaggaactgggtgaaatcaatttcaagaactggcctatcgaaaaatacgaggatgtcgaagttagaaataactatgatgcgatcaaggaagagcatggagaaaactcgaaggagatgaagaggtttttggaagcaattgcccttatttccagagaccatgctagaacacctatgcaatggtctcgtgaggagccaaatgctggtttttctggtcctaatgctaaaccatggttttacttgaacgagtctttcagggaaggaattaacgctgaagacgaatccaaggaccccaactcggttttgaacttctggaaggaggccttgagatttagaaaggcacacaaggatattactgtgtatggatatgattttgagtttattgatttggacaataagaaactgttcagcttcacaaagaaatacgacaacaaaacattgtttgctgctttgaacttcagctctgattcgatcgacttcacgattccaaacaatagctcatcgtttaagttggaattcggaaactacccaagaagtgaagttgatgcgtcttccagaacattgaagccatgggagggcagaatttacatatctgaatga

SEQ ID NO: 100 - DNA, 2001 bp, Saccharomyces cerevisiae
atgggaaagactaaaacaagaggcagaagacaccaagacaaacagagaaaggacgaatttgaacccagttcaaattctgcgaaggagcacatccagcaagaagagtctacttacaatgacgaagccgaaattaaagagactcagccacaaatgttttttggtgtgctagatagagaagaactggagtatttcaagcaagccgaatcgactttgcaattagacgccttcgaagcacctgaggaaaagtttcaattcgtcacgagcattattgaggaagcaaaaggtaaagaactgaaattggttacttcccaaataacttcgaaattgatggaacgagttattcttgaatgtgatgagactcagttaaaagacattttccaatctttcaatggcgttttcttcgggttgtcatgtcataaatatgcttcccatgttttagagactttatttgttagaagtgccgccttggtagaaagagaacttttaacaccaagttttgataacaatgaaaaagaagggccttatgtgactatggaaaatatgtttctctttatgttgaatgaactgaaaccgcacttgaaaactatgatgaaccatcagtatgcatcacatgttttgagattgctaatattaattttgtcttccaagacattgcctaattcaactaaagcgaactctactttacgttccaaaaagtcaaaaattgcaagaaaaatgattgacattaaagataatgacgatttcaataaagtttaccaaacaccggaatctttcaaatctgaacttcgtgacataataactactttatacaaaggatttactaatggtgccgagtcgcgttctgatatttcgcaatctactatcaccaaatttagagagtacagtgtggataaagtggcttcccctgtaattcagctcattattcaagtcgaaggtatttttgacagggaccgttcattttggagattggtcttcaatacagcagatgagaaggatcctaaggaggaatcattcctggaatatttactgtcagatcctgtcggttctcatttcttagaaaatgtgattggctctgccaggctaaaatatgttgaaagactttatcgtttatatatgaaagaccgtattgtgaaactagcaaaaagggatactacaggtgcctttgtagtgcgtgcattgctggaacatttgaaggagaaggacgtaaaacagatattggatgcagtagttcctgaattaagcatgcttttaaactcaaatatggattttggtactgctattatcaacgcaagcaataaacaaggtggttacttaagggatgatgtcattgctcaattaatacaaaaatattatccagaaaagtctgatgcaaagaatattttggaaagttgcctgttgttgagtgcatcgactttgggcaataccagagatgactggccaacagcagaagaaagaagacgatcagttttcttggaacaattaattgactacgacgacaagtttttgaatattaccattgacagcatgttggctctgcctgaggaaaggttgatacaaatgtgttaccatggagtattttcgcatgttgttgagcacgtactacaaactactagggtggacataattaagagaaaaatgctattgaacatactgtctaaagagtctgtaaatttggcatgcaatgtatatggctctcatataatggacaaattgtgggaatttacggcaaaattaacattatataaggagcgtattgctagagcattagttttagaaactgagaaggtgaagaatagtatttatggcaggcaagtgtggaagaattggaaactggaattatatgttagaaaaatgtgggattggaaaaaactaattaaggagcaagaatttgaaatatttccaaattctaaaccgctacagccaaagccagaaaagcactcaagagaaagaaataattcgaaggaaggaagcgccttcaaaaagcaaaagcactatagataa

SEQ ID NO: 101 - DNA, 1098 bp, Saccharomyces cerevisiae
atgccaaatactgctccgccacttccacgtgcaccaccagtaccaccggctacttttgaatttgactctgaaccaacagccactcattcacatacagctccttctcctccaccacatcaaaatgtcacggcctctacaccttcaatgatgagtacgcaacaacgtgtgccaacctcagtactatctggggcagaaaaagaatcacgaaccctaccgccccatgtgccttcattgacgaatcgtcctgtggattcattccatgagtcagatactacaccgaaggtggcctctataagaaggtcaacgacgcatgatgtaggcgagatttccaacaacgtcaagatagagtttaatgcacaagaaagatggtggattaataaaagcgcacctcctgctataagcaatctgaagttgaactttttgatggagatcgatgatcatttcatttccaaaagattacatcaaaaatgggtggtaagggatttttacttcttgtttgaaaactattcgcaactaagattctccttgacctttaatagtacaagcccagagaaaacggtaacgactcttcaagaacgctttccatcgccagtcgaaacacaatcagcacgtattcttgatgaatacgctcaaaggtttaatgcgaaagttgtagagaaatctcattcattgataaattcacatattggggctaagaatttcgtgtcacaaattgtatccgaattcaaagacgaagttatacaacccataggagcaagaacgtttggcgcaactatattgagttataaacctgaagaaggaatcgaacagttgatgaagagcttacagaagattaaaccaggtgacattcttgtaattagaaaggccaaatttgaagctcataaaaagatcggaaaaaacgaaattatcaacgttggaatggactccgccgctccgtattcgagtgttgttactgattatgattttacaaagaataagtttagagttatcgaaaatcacgagggaaagattattcaaaacagctacaagctaagccatatgaaaagtgggaagttaaaggttttcagaattgttgcgagaggatacgtaggttggtaa

SEQ ID NO: 102 - DNA, 660 bp, Saccharomyces cerevisiae
atgaggttccagcttttcatatatttttatttcaccattgttgtgattgcaggaactaacacaatacaacagttcagcgatgcgggcgataggttaatcacatcattgagaaatctggacaacaatggaacatacgaaacattgacagcagagaaggtgcctattatcgagggacaaattcaaaacattagtgcaaaatatgagcagcatacttttattttgaagggcttagaagcggtgctaaattataaagtgaaaagtttggataataatgagagagagtcgctcgaaatagaatatgaaaaggtggaaaaggcactagatgcggctttgaatgtttcaccatttgaatatatcaaaaagtttaaagaagtctccaggggcaaggtagttaatgctttagaaaacctcagtagagaacagaatcgaattactataaatggtggtagagaagacgaaaaagaaaaagaagcgagggaaaaaaagaaacgactagacagaataaagagaatcctaactgtaagtctgttagaattgggtctagctcaaggagtggccgatttatgtgcagtagcaccttttgcgtgtcttcttggggtgacagttggaagcatcggtttcatattttggttggcactaatatataatgctattcaataa

SEQ ID NO: 103 - DNA, 402 bp, Saccharomyces cerevisiae
atggacagagaccatattaatgaccatgaccatcgaatgagctattccatcaacaaggacgacttgttgttaatggttttggcggttttcattcccccagtggccgtctggaagcgtaagggtatgttcaacagggatacactattgaacttacttctcttcctactgttattcttcccagcaatcattcacgcttgctacgttgtatatgaaacgagtagtgaacgttcgtacgatctttcacgcagacatgcgactgcgcccgccgtagaccgtgacctggaagctcaccctgcagaggaatctcaagcacagcctccagcatatgatgaagacgatgaggccggtgccgatgtgcccttgatggacaacaaacaacagctctcttccggccgtacttag

SEQ ID NO: 104 - DNA, 327 bp, Saccharomyces cerevisiae
atggtagctagttgtaaagatcagaagaaggctgtcgctatatgtttgcagagatcgccctgtgtcatgatagagagacataaccctcaagaatgtcttgacaatccagagctgaataaggatctgcccgaactttgtattgctcagatgaaagcatttttggattgtaagcgaggaatcgtcgacatgactaagcggttcacaggtaacgcacctctgtcgactggcaagtacgatcaacagtacgaaaacttgtgcaaaggaaagtttgatccgagggaggagatggaaaagctaaaacttctgaacagccagcagaaggactga

SEQ ID NO: 105 - DNA, 1362 bp, Saccharomyces cerevisiae
atgaacaacacttccataaccggaccacaagtactacatagaacaaaaatgagaccactaccagtgctagaaaaatactgtatctcgccacatcatgggtttttggacgaccggttacccttgaccagactgagcagcaagaaatatatgaaatgggaagaaatcgttgctgacctgccctctcttttgcaagaggataacaaggtgcggagcgtcatcgatgggctggatgtcttggacttggatgagacgatcttgggcgacgtcagggagctcagaagagcatattccattttggggtttatggcgcacgcttatatttgggccagcggaactccccgggatgtattaccggagtgtattgcaaggccactgttggagacagcacatattttgggtgtgccaccgttagctacgtactcctcgttggtgttatggaacttcaaagtgaccgacgagtgcaagaaaacggaaaccgggtgtttggacttggaaaatattacaacgataaacacatttacgggaaccgttgacgaaagttggttttatctggtcagcgtgcggtttgaaaaaatcggcagcgcttgtttaaaccatgggttgcagatattgagagccattagaagcggtgataaaggagacgctaacgtgatagacgggttggagggcttggctgcaacgatcgaaaggttatcgaaagccttgatggaaatggagcttaagtgtgaacccaatgtattttatttcaagataagaccatttttggccgggtggacgaatatgtcgcatatggggttaccacagggtgttaggtatggagcggaaggacagtatcggatcttttctggcgggtccaatgcgcaaagctcgttgatacagacactggacatccttttgggtgtgaaacacactgcgaatgctgcgcattcttcccaaggagacagcaagatcaattatctggacgaaatgaaaaaatacatgccaagagaacatcgtgaatttctttaccatttggaatcggtatgtaatattcgcgaatacgtttctcgtaacgcttctaaccgtgcattgcaagaggcctatggacgttgcatttccatgctgaaaatatttagagataaccacattcaaattgttaccaagtacattattttgccctccaattcaaagcaacacggctccaataagccgaacgtactaagtccaatcgagcccaataccaaagcaagtggttgtttagggcataaagttgcctcatctaagactatcggaaccggtggtacaagattaatgcccttcttaaagcagtgcagggacgagactgtcgccactgcggacattaaaaatgaagataaaaattga

SEQ ID NO: 106 - DNA, 1086 bp, Saccharomyces cerevisiae
atgatttctgctaattcattacttatttccactttgtgcgcttttgcgatcgcaacacctttgtcaaaaagagattcctgtaccctaacaggatcttctttgtcttcactctcaaccgtgaaaaaatgtagcagcatcgttattaaagacttaactgtcccagctggacagactttagatttaactgggttaagcagtggtactactgttacgtttgaaggcacaaccacatttcagtacaaggaatggagcggccctttaatttcaatctcagggtctaaaatcagcgttgttggtgcttcgggacataccattgatggtcaaggagcaaaatggtgggatggcttaggtgatagcggtaaagtcaaaccgaagtttgtaaagttggcgttgacgggaacatctaaggtcaccggattgaatattaaaaatgctccacaccaagtcttcagcatcaataaatgttcagatttaaccatcagcgacataacaattgatatcagagacggtgattcggctggtggtcataatacggatgggtttgatgttggtagttctagtaacgtcttaattcaaggatgtactgtttataatcaggatgactgtattgctgtgaattccggttcaactattaaatttatgaacaactactgctacaatggccatggtatttctgtaggttctgttggtggccgttctgataatacagtcaatggtttctgggctgaaaataaccatgttatcaactctgacaacgggttgagaataaaaaccgtagaaggtgcgacaggcacagtcactaatgtcaactttatcagtaataaaattagcggcataaaaagttatggtattgttatcgaaggcgattatttgaatagtaagactactggaactgctacaggtggcgttcccatttcgaatttagtaatgaaggatatcaccgggagcgtgaactccacagcgaagagggttaaaattttggtgaaaaacgctactaactggcaatggtctggggtgtcaattaccggtggttcttcctattctggatgttctggaatcccatctggatctggtgcaagctgttaa

SEQ ID NO: 107 - DNA, 504 bp, Saccharomyces cerevisiae
atgcaagaattttattctttttcaccaatagatgaaaacggaaatccattccccttcaactccctgcgtaacaaagtggttttgatagtcaatgtagcatctcattgtgcgttcacacctcaatacaaggaattagagtacttgtacgaaaaatacaaatcacatggtctagtgattgtggcctttccctgtggtcaattcggaaatcaagagttcgagaaggataaagagattaataagttctgtcaagataaatatggtgtaaccttccctattctacataagatccgttgcaacgggcaaaagcaagatcccgtctacaagttcttaaagaattcagtaagcgggaagtctggaataaaaatgataaaatggaattttgaaaagtttgtggtagaccgaaatgggaaggtggttaaaaggttttcatgcatgactaggccactagagctttgtccaataatcgaagaattactgaatcaaccaccagaagaacagatttaa

SEQ ID NO: 108 - DNA, 1551 bp, Saccharomyces cerevisiae
atgaattccggaggtgaagaaccaactataaagccaaatgtatttaatattactcaacttttaaactcaaatggtgaaaaaccgggaattgcttgcatcttcttaagtaaatttgacatgaaaaagggaaatatcataatatggtctaaaagtattaatggtgcggcaattgacttaagcaatattgaatttaaatcgttaccagccggtattcacgaacaaactgacgatgttgtcaattttgtagttcctaaagaattagatgtctgtcaaactgccaagacgacaacttatgattacggcatcgcctatttcaaacaaaattcgttcgatattattgagaatgacaatcgtattgataggagtaaagttcaaatgttttctcttggtgtaattatcgatgtccaaaatgcctcatcagatagtaaaaagcacttttataaggaaatataccatgcgtatgctgccaacagatactcaagctatctagaaagtttactcggtcaatggataaggcagcgtgatcttgataagtttgatatttttgaaaagttttttgacgagaataaccaagggcacatggctgaaaattcagtagaagtctttgaacattcacccaaagaaagacggcatttggttgaatatttgccatactggacaaggaagttagggcctctcatatttccactttggaaagcaagtctccttcagtcaaggatattgatactagttcctcaaggagaatcgttcgaattgtgcaattctttggcctattgtgtcttcttaatatcaatgcttccaaaaaacttgataggaaaccatgtaagcgatgaatatattaagcctattttcacggtatcaacatcagatattccttttctagagtcgttcaaaaaggggaacggttatgtggctacgaccagcgaggaaattttgttgtataagcctgaaatttacgacatagtagtcaaacttacttcgagctcaactatagaagaatcaccagaaaaagaagtggaaattcttaccgcatctggtgaacaaaacaaagcaactcctcttgacttagaggtgtatgaaaaacttatactgggggagttacaagaggatgcctctacaaatgcgacatgtcgacatcatgaggtgacagaacccatatcatggctacagtttttaattgatgggttttttcttttaactactgcaggctatctggtagcgccatatcaccttgcaaataatttcaagattccgaggcacgtttctggcccagaacccaacaattcagaaatacagatcgctgaaaatttagttcgctattttcaccgcagaacatcaaatctgtacaacgatctgaaggatgtcatacaaaaaagtgaaaatattgattcagaacaaccgattactatcgcagcttcatttttaaccaagttaaatttggattgctttagcaaacaagatcatcaattcgtcaaggatatcgcccttaaatggttccaaagaagcattgatattagcaacctaccagaatgtttgggaaatctctgttaa

SEQ ID NO: 109 - DNA, 1353 bp, Saccharomyces cerevisiae
atggctaaagatttattgcccaagcaagcggccaacgagccatcgttaaaggactgtacctgtaaaagatgtcttaaattgggtgcttcaaaagaaaaaaagattagaagaaagaagaaaggtgaggagaaaagagaaagacattatggaaatagacgaaagttaacattcaactttttgaagcatacgaacatggaaaatacaaattacgacgtaatcacttcggttggatatctgaatgaaaaatacggattgaaaaaatcacattacattgaaaaatttatcaaatgcatccatagaaaaataaatatcgatgttagcaaaattacggacgcctatgtaaactcgctaaacccgtgggttaaagtaaaactcttccttttattggtgacattgtctgaaaagggtggtccggaatactggctagataagacagatggtgaaaagaactcagaggcgtcttcaacagataatagtttggaaaattctactaaaggagcagatagcgctggatctactgctttgagagatgaaatggtcaaaagccataaaaaccttttcccaactcttacagagcaaatcatacagcataacatcaaccaagattttacggaatcgacttacgacgaggattatgtattttcgtcaatttgggcaaacttcatggaaggactgatcaatcactatttggaaaaagtcattgtaccttactcggaaatgaaagtctgtcagcaattatacaagcctatgatgaaaattatctccctctataacgaatacaatgagcttatggtcaaaagcgaaaagaacggattcttgccttctctacaagactccgaaaatgtccaaggtgataaaggcgaaaaagagagcaaggatgatgccgttagccaagaaagactggaaagagcgcaaaagctgttatggcaagctcgagaagatattccaaaaacaattagcaaagaattaacgttgttatcagaaatgtattctacattatctgctgatgagcaagattacgaattagatgaatttgtttgttgcgcagaggagtacattgaattggaatacctacctgcccttgtagatgtcttgtttgctaattgtggcacgaacaacttctggaaaattatgttggtgttggaaccctttttctactacattgaagacgtcggcggagatgatgatgaagatgaagataatgtggacaatagcgagggcgacgaagaaagcttacttagcaggaatgtggaaggagatgataatgtggttgagcgtcattttaagcctgatccaagggtcattacactggaaaaaatatgtgaagttgctgcaagacagaaatggatataa

SEQ ID NO: 110 - DNA, 1239 bp, Saccharomyces cerevisiae
atgtcccaaggtactttatacattaatagatctccaagaaactacgcttctgaagctttgatttcttactttaaactagatgtcaagatcgttgatctagaacaatctagcgagtttgcttctttgttcccattgaagcaagcccctgcatttttgggtccaaagggcttaaagctaactgaagctttggctatccaattttatttggctaatcaagttgccgatgaaaaagaaagagctcgcttattaggttccgacgttatcgaaaagtctcaaatccttagatgggcatctctagctaattccgatgtcatgagcaacattgctcgtccattcctttctttcaaaggtttgattccatacaacaagaaagacgttgatgcttgttttgttaaaatcgacaacctagctgctgtcttcgatgctagattgagagactacacctttgttgctaccgaaaacatttctctaggtgaccttcatgccgctggttcttgggcttttggtttggccactattttgggccctgaatggagagctaagcatcctcatttgatgagatggttcaacactgttgctgcttctccaatcgtgaagactccatttgctgaagtcaaattggctgaaaaggctctaacctacactccaccaaagaagcaaaaggctgaaaagccaaaggccgaaaagtcaaaggctgaaaagaagaaggacgaagctaagccagcagatgatgctgctccagctaaaaagccaaagcacccattggaagctttaggaaagtccacatttgtcttggatgactggaagagaaagtactccaacgacgacaccagaccagttgctttgccatggttctgggaacactacaaccctgaagaatactccatctggaaggttggttacaaatacaacgacgaacttaccttgactttcatgtccaacaacttggtcggtggttttttcaacagattgtccgcttctactaagtacatgttcggttgtttagttgtctatggtgaaaacaacaataatggtattgttggtgccgttatggtcagaggccaagatttcgctccagcctttgatgtcgctccagactgggaatcttacgaatacaccaagttggacccaaccaaggaagaagacaaagaatttgtcaacaacatgtgggcttgggataagcctgttgttgtcaatggcgaagataaggaaattgttgacggtaaggttttgaaataa

SEQ ID NO: 111 - DNA, 279 bp, Saccharomyces cerevisiae
atgcaattctctactgtcgcttccgttgctttcgtcgctttggctaactttgttgccgctgaatccgctgccgccatttctcaaatcactgacggtcaaatccaagctactaccactgctaccaccgaagctaccaccactgctgccccatcttccaccgttgaaactgtttctccatccagcaccgaaactatctctcaacaaactgaaaatggtgctgctaaggccgctgtcggtatgggtgccggtgctctagctgctgctgctatgttgttataa

SEQ ID NO: 112 - DNA, 396 bp, Saccharomyces cerevisiae
atgagtcaaagtcgctggagtatcgttctcatctttgcattgtttatttttggcagcactggagtgaatgccttcttcaatttcggtcatcatcagcaacagcaacagcaacagcaacaatcatatgaagatcaagttttaaataacccttgtgatgggtatttgtgtccggacaccctaacgtgcgttgcacagcagaaagactgtccttgtcccttccctaaatctcagttgaaatgtgtccttcctgataataaatttgtttgcatatccaaaccagccacacacaatgaaaagtttagagcaatatatgatgaccctgtcaagggccccaaagcaaagaacaaggggtttagggattgtggatgggtatcagatgcttacaaaaaccattga

SEQ ID NO: 113 - DNA, 810 bp, Saccharomyces cerevisiae
atgagtaataataaaataaaaagaaaggatgcaagcccggaacaagaggcaattgaatcattcacctcattaaccaaatgtgaccccaaggtatccaggaagtacctgcagcgtaatcactggaacatcaattacgctctcaatgattattatgacaaggaaatagggacgtttactgacgaggtttcaactgtggctcatccacccgtatacccgaaggagctaacacaggtatttgaacactatatcaataacaacttgtttgatatagactcactggtcaagttcattgaggagctaggctacaatcttgaagatttagcgacattatgcttagcccatttactggggtacaagaaactagaagaacccttaaaacgagaggacttcctgtcaacatggtttatgcaaggctgttccaccatttcagacatgcaagagtgcatcaagacgttagatgttaaattacatgaagacttacaatatttcacacagatttataactatgctttcaatttgattctggacccaaatcgaaaggatatagatacagacgaaggcatccagtattggaagctatttttccaaccagagtacccagtgcgtatggaaccagatttgcttgaggcatggttccgtttccttcgcgatgaggggaaaaccactataagtaaagacacctggcgtatgctgctcctctttttcaaacgataccccactattcagaaaataataagcgattacgacgaaactgcagcctggccatttattatcgatgagttctatgagtgcttacaggatcagcaataa

SEQ ID NO: 114 - DNA, 1008 bp, Saccharomyces cerevisiae
atgtctgaaccagctcaaaagaaacaaaaggttgctaacaactctctagaacaattgaaagcctccggcactgtcgttgttgccgacactggtgatttcggctctattgccaagtttcaacctcaagactccacaactaacccatcattgatcttggctgctgccaagcaaccaacttacgccaagttgatcgatgttgccgtggaatacggtaagaagcatggtaagaccaccgaagaacaagtcgaaaatgctgtggacagattgttagtcgaattcggtaaggagatcttaaagattgttccaggcagagtctccaccgaagttgatgctagattgtcttttgacactcaagctaccattgaaaaggctagacatatcattaaattgtttgaacaagaaggtgtctccaaggaaagagtccttattaaaattgcttccacttgggaaggtattcaagctgccaaagaattggaagaaaaggacggtatccactgtaatttgactctattattctccttcgttcaagcagttgcctgtgccgaggcccaagttactttgatttccccatttgttggtagaattctagactggtacaaatccagcactggtaaagattacaagggtgaagccgacccaggtgttatttccgtcaagaaaatctacaactactacaagaagtacggttacaagactattgttatgggtgcttctttcagaagcactgacgaaatcaaaaacttggctggtgttgactatctaacaatttctccagctttattggacaagttgatgaacagtactgaacctttcccaagagttttggaccctgtctccgctaagaaggaagccggcgacaagatttcttacatcagcgacgaatctaaattcagattcgacttgaatgaagacgctatggccactgaaaaattgtccgaaggtatcagaaaattctctgccgatattgttactctattcgacttgattgaaaagaaagttaccgcttaa

SEQ ID NO: 115 - DNA, 342 bp, Saccharomyces cerevisiae
atggccggtttaaaagacgttgtcactcgtgaatacaccatcaacttgcacaaaagactacatggtgtcagtttcaaaaagagagctccaagagctgtgaaggaaatcaagaaattcgccaaattacacatgggtactgaagatgtccgtctagccccagaattgaaccaagctatctggaaaagaggtgttaagggtgttgaatacagattgagattgagaatctccagaaagagaaacgaagaagaagatgccaagaacccattgttttcctacgtcgaaccagttttggttgcctctgctaagggtctacaaaccgttgtcgttgaagaagatgcttaa

SEQ ID NO: 116 - DNA, 792 bp, Saccharomyces cerevisiae
atgaggaattttttcacgttattttttgcagctatattttcgctaggagcacttatattagccattgttgcatgcgcaggatcaacgaaaaattacagtcccataaataaaatttactgtgcagaattggatctgtcgcagatgaaggtatcgacggtgctcccttctttgagttctgctacgctatcttcgttgggcctgccctcatatataaatatagggctttggtcgtactgtacagtggactcctcgcataacatccaatcatgttcttcgcctcacggtatccagaattttaacctatcgtcattagtgtatgacaatatcaacaacaatgaggctctggagcttatggattccgtggccagtgttgttttgcccgaaaaactaaaaagtaaaatgacatactacaacaatttggtcaagtgtatgttcattaccattcttattggtattgtcttgacctttgtgaatctagtgttcaacgtattgcgctggatcatccacataaggccgctaacgtggtttggtgcctttttttcatttttcgcctttgccgccctattagtcagtataggttcgtgtttgggcacttactcatacatcaaatacatcctaaagcataactatagtgattacggtatttcaatgagcattggtaggaactaccagggtttgatgtggggggctgtcgttggagcattactgaatttcattctatggtgtagcgtgagatcgaggcccaccgtcatctatgcgaacgctccaattgaggaaaaaccattgatttga

SEQ ID NO: 117 - DNA, 387 bp, Saccharomyces cerevisiae
atgcttgttttttcttttctgtttgttgtagtctctataaatttaaatgcacttatctttttatgcaaaaaaagctgggcgagttatttgtttctatatttgtataatttttttttttgtgaagatgaatataaactgacaaaaaattgtgtcagagttgaagctatagctccttttatgatgtgtcttggttctttgggtgcgatattagggaaacaacgcacagcaaattttcttctgctttcttataacgttataaacaatcctgttgtcttggtttattatgtggaaaacttttcacggatcaattttataaagcatacaactaaagagaaaagtgtaatatggacgaacgagagacaacttaatccatggatttgtaattga

SEQ ID NO: 118 - DNA, 1578 bp, Saccharomyces cerevisiae
atggctgccggtgaacaagtttctaacatgtttgacactatcttagtgttagactttggttctcaatactctcatttgattaccagaagattaagagagtttaacatctatgctgagatgttgccatgcactcagaagatctctgagttgggctggactccaaagggtgtcattctttctggtggtccatattccgtatacgctgaagacgctccacacgtagaccatgctatctttgatttgaacgttccaatcctgggtatctgttacggtatgcaagaattggcttggattaatggtaaacaagttggtcgtggtgacaagagagagtacggtcctgccactttgaaggtgattgacgattccaactctctattcaaaggtatgaacgactctactgtctggatgtctcacggtgataaattgcacggcttgccaactggttacaagaccattgccacctccgataactccccatactgtggtattgtccacgaaactaagccaatctatggtattcaattccacccagaagttacacattctacccaaggtaagactcttttgaaaaacttcgccgttgatttgtgtcacgctaagcaaaactggactatggaaaactttatcgacactgaaataaacagaatcagaaaactggtcggtccaactgctgaagtcattggtgctgtttccggtggtgttgattctactgttgcatccaaattgatgacagaagccatcggtgatagattccatgccatcttggtcgataacggtgttttgagattaaatgaagctgctaacgttaaaaagacccttgtcgaaggtttaggtatcaacttgatggttgtcgatgcttccgaagaatttttaagtaaattgaagggtgtcactgacccagaaaagaagagaaagattattggtaacacatttatccacgtctttgaaagagaagctgaaaaaattaagccaaaagatggtaaggagattcaattcctgttacaaggtactctttatccagatgtcatcgaatccatttctttcaaaggtccttctcaaaccattaaaactcatcacaacgtcggtggtttactagagaacatgaaattaaagctaattgaaccattgagagaactgttcaaagacgaagtcaggcatctaggtgaattattaggaatccctcatgatctagtctggagacaccctttccctggtccaggtattgctattcgtgttctaggtgaagttactaaggaacaagtcgaaatagcaagaaaagctgacaacatttacattgaagaaatcaagaaggccggcttatacaaccaaatttcccaagcctttgcctgtttgttgcccgttaaatccgttggtgttatgggtgaccaaagaacctatgatcaagttattgctttgagggccattgaaactactgatttcatgactgctgactggttcccattcgaacacagtttcttgaagaaagtcgcctcaagaattgtcaatgaagtcgatggggttgctagggtcacttacgatataacttccaaacctcctgcaactgttgaatgggaatga

SEQ ID NO: 119 - DNA, 726 bp, Saccharomyces cerevisiae
atggtcaaagctgttatttttaccgatttcgacggtaccgttactttggaagattctaacgattatctgaccgatactttaggtttcggtaaggaaaaaagattaaaggtcttcgaaggcgtgttagatgatactaagtcttttaggcaaggtttcatggaaatgctggaatccatccacacccctttccctgagtgtatcaagatcttagaaaagaaaattcgattggatcctggtttcaaggatacattcgaatgggctcaagaaaatgatgtccctgtcatcgttgtttccagcggaatgaaaccaattatcaaggttttattgaccagattagttggacaagagtctattcacaaaattgacattgtttccaatgaagtggaaatcgatgcacatgatcaatggaaaatcatctataaggatgaaagtcccttcggacatgacaaatccagaagtatcgatgcttataaaaagaaatttgaatctaccttgaaagcaggtgaacaaagacccgtttacttttactgtggtgacggtgtttctgatctaagtgctgcaaaagaatgtgatttgctatttgccaaaagaggtaaagatttggtcacttattgtaaaaaacaaaacgtcccattccatgaattcgataccttcaaagacatcttggctagcatgaaacaagttctggctggtgaaaagacagtcgctgaattgatggaaaattag

SEQ ID NO: 120 - DNA, 1761 bp, Saccharomyces cerevisiae
atgtcacgaagtaacagtatatacacagaagatattgagatgtatcctactcacaatgagcagcatctgacgagagaatacacaaaaccagatggtcaaacgaaaagtgaaaaactaaatttcgaaggcgcttatatcaacagtcacgggactctatccaagactaccacaagggaaatagaaggcgatttagactctgagacttcttctcactccagtgatgataaagttgatccaacccaacagataactgcagagacaaaagcgccatatactttactaagttacggtcagaagtggggaatggttgcaattctaacaatgtgtggcttttggtcttcattgggatcaccgatctattatcccgctttgaggcagttggaaaagcaatttaatgtggatgaaaatatggttaacgttactgtggttgtgtatctgttgtttcaaggtatatctcccacagttagcggtggtctggcggattgctttggacggagacctataattttagcaggtatgctgatatacgttattgcatccatcgggctagcatgtgctccatcatacggtgttattatcttcttgaggtgtattcagagtattggtatttcccccacaattgcaatcagttctggtgttgtcggggacttcactttgaagcatgaaagaggtacatttgttggcgccacctcagggtttgttttactgggtcaatgttttggtagtcttattggtgccgtcctgactgcaaggtgggattggagagctatcttttggtttttgaccattggttgtggaagttgttttctaattgcctttcttattttgccagaaacaaagcgaaccattgcaggtaacctttccattaagcctaaaagattcatcaacagagcgccgattttcctactgggcccagttagaaggagattcaagtacgataatcctgattatgagacattagatcccaccattccgaaactagatttgtcatccgccgggaagatccttgtattgccagaaattattctgtctttatttccatcagggctcttatttgctatgtggacgttaatgctttcctctatttcatccggtttatcagtggcgccatacaactatcatttggtcattattggtgtgtgttatctacccggtggtattggcggtttaatgggttccttcttcacaggtagaattattgacatgtatttcaagagaaagatcaagaaattcgagcaagacaaagctaacgggttgattccacaagacgcagagattaatatgttcaaagtccgtttagtttgtcttctgccccaaaatttcttggccgtcgtagcctatcttttatttggttggagtatagataagggctggaggatcgaatctattttaattacttcatttgtctgttcatactgtgctatgagtacattatcaacatcaactacgttattggtcgatttgtacccaacgaaatcatctacagcaagtagttgtttcaactttgttaggtgcagtttgagtaccatcttcatgggttgctttgccaaaatgaaagctgcgatgactgtaggtggtacttttacatttttatgtgcgctggtatttttcttcaacttcttaatgtttattccgatgaaatatggtatgaagtggagggaggatagattattgaaacaacaaagacagtcttggttaaacaccttggcagtcaaagccaaaaagggaacaaaaagagaccagaacgataatcataattaa

SEQ ID NO: 121 - DNA, 1368 bp, Saccharomyces cerevisiae
atgtcaaaattgttcttagatgaactgcctgagtctctcagccgaaagattggtaccgtggttagagtgctgccaagctcattagaaatatttgaggaattgtataaatatgcattgaatgaaaatagcaacgatagaagcggacgccataaaaagcccagaatagatgtctcttctgacctgcttaaaacagatgaaatttcggaaaccaatactattttcaaattagaaggtgtttctgtactgtcaccattaaggaaaaagcttgatttggtgttctatctttccaatgttgacgggtctcccgtaataacattactgaagggaaatgacagggaattaagcatttatcagctgaacaaaaatatcaaaatggcttcgttcttgccagtgccagaaaagcctaatctaatatacctttttatgacttacacatcgtgcgaggataacaagttttctgaacctgtggtaatgaccttgaacaaagaaaacacactaaaccagtttaaaaatttagggcttcttgattccaatgtaacagactttgaaaagtgcgtcgaatatataagaaagcaagccattttgacgggttttaaaatctccaacccattcgttaacagtacactggtggataccgatgctgaaaaaataaactcatttcacctgcagtgtcatagaggtactaaagaaggcacgctatattttttaccagatcatataatttttgggtttaaaaagcccattttgttattcgacgcttctgacatcgagtctataacctattcgtctattaccagattaacattcaatgcaagcttagtgacaaaagatggtgaaaaatacgagttttccatgatagaccaaactgaatacgctaaaattgacgactacgttaaaaggaaacaaatgaaggataagtctatgtctgaggaattgaaagctaaatccaagagcaaaggccaagcaactgatggcacagccgatcagccatctattctacaggaagctacccgtcaaatgcaagacgagaaaaaggcaggtgtgttttcagacgatgatgaagaaaatgaccaaaatttcgaagctgagagcgacctttccgatgggagtggccaagaatcctcagacggtgcagaagacggagaggaagcagaagaagatgatgaagaagacgatgaagaggaagacaaaaagggccaaagcgctttgaatagagataatagttttgcttctataaatggtcaaccagaacaggaactccaatacaaagagtttaaggagccgttagaactcgaagatattccgatagaaattgataatgatgacgatgaagatgatgaggatggatccggagtagaatacgattga

SEQ ID NO: 122 - DNA, 396 bp, Saccharomyces cerevisiae
atgtgtggtatctatccctaccagttggtaacttcttcggcctcaccaaagacagacgtcttcgtttcatcgttaccaacgtcacctccccaagctcttggagcggcatcggtaatggccttgcagttggtttttaaaaattgtactatcagtttgtttatcagcttaaactccaataggaaggcatcgtggccttcgggagattcaattttttctaattgcgacttcggtatgtgctcagccaaaaattcttgttctgaatatgtgaacagtccatcagattggataccgatgatcagggatggttgttggatggtagaaaggacctcagtgatgtcatctactctgtctcttgccaaatcgtgcgtatccagtttacgtgtgatggcaatgtaa

SEQ ID NO: 123 - DNA, 1986 bp, Saccharomyces cerevisiae
atgagcggttttaaatgctatttgcaattgggtgacaggctctctcaaatatggctaaataagtatactttggttttgctgctagcaatgctgaagcttctgtttttctccaaatccatacaacatgcgatagaagtctcggaaacgtatattttgtccaattgttacagtattgattcactatactccaagatgacagacaacacgccgcactatttaggtatcatggggaattatcttatcgagaagggtatggaggagactgttaaagctacgctagagacgttatcacttatagtatatgcgagcgaggggctggtaaactttgccattgacctgtatttgggcacttatgcctgtttgattgttagtgccgttgatggtaccgtggacgttgctactaacattacagaaaaactgattagcttagtcaatgatacagtttcaagtgtggctaatgaattggatacgggcttgaatgacatctccaaaataatcaataaagtgatcaaggccgcatccaaagtagagaattttttcacaggtgatgacgatgacagtaacatgacgtcgtcaatcaaaagcgtcaacttaaccatatctgcgcttcacaatttatacattccttcctcaatcaacgataagcttgaagagttatcggcaaagacgccggactttgcccaggttaagaatacaaccaagaacctgatctcggttcccttcaatgaagttcggaagaatatcaaggccgtgaatgccagcaatataatcggagatacctccgttttgtacgtacctcccgtgtcccttgacaacagtactgggatttgctcatccaatcaatcagaaattttggccttttattccatcttgggacatgtcctgaaaatagccaccgtagtgtgcattaccgtattgatatgcttcgctgttggtgcgatggcgcccgttgcatggaatgaaatcaagctctggaggcgcctttgcggaatgagagaccattacatgctgagcaggcaagattcgtatacgtccttttccagtgaaaacacgcacgaattgaaagatccatttagagatcctcctatacaaaatggccaatatgatgtcattgcaagctatcagcagtgctttcaaacatggaacacaagaatagcaggctggatgacaaatcttgttacctttggaaaatcaccagagaacattgacccaaagactaaacaaaaaatagaatgggtagtggcttatatgacctccgaaagagcactgtgtgttcttggaattggacttttgggaattttagtgtgcatatgccaatttgtcatgatagcactgttaaaacacaagataagccattcattgacttctaatgatggtgacggcgttcaaaatttgctgaagtctagcactgccgtcgatatagagaaccaaatgagcctttggagcgttcagactaataaatatataaatactacggagaccaatatcaatcaggaagtattcgggtggataaacacgacaacactttctgtgaacaatacagtggccaccatgatctctgatatagacacaactttagcagatgtattcaatggaacactgctatataacccaatgaaaaccgtggtcggatgtgccattgaaaataagctctacacaatagagaaggcaatgacgtggattcacgacaaggctcagctgcatatcccgagaattaatgggacacaaatcaagcaagctctggcaaagcaaaccgacaacagcactatacccactgcaagctccacttctgccgccacagaaaacttactggagaaccttgtgaatgatatgagagaaggacttttaaaaattctccgagcttaccaccgtataactctgggagaactcacggtagccttggtcattcttgcggtgtggctcgtacaattgcccatagctctggtaattctccgattacgtcttcgcaaagccacctttgactga

SEQ ID NO: 124 - DNA, 1155 bp, Saccharomyces cerevisiae
atggttacatatgctggaaaactggttctagctccaatggtaagagccggcgaactgcccacgagactgatggcgctggcccacggtgcagatctcgtctggtccccagaaatcatcgacaaaaagctaattcagtgcgtcaggaaggaaaacactgcactccaaactgtcgactacgtcgtgccgtccaaggttcaaacgaggccggagacgctcgttttcagaacatatccaaaactagaatcctctaaattgattttccagatcgggtctgcatccccggctctggccacccaggctgctttgaaagtgatcaacgacgtcagcgggatagatatcaatgcaggctgccccaaacacttctctatacactccggcatgggctctgccctcttgcgcaccccagacacactgtgtctcatcttgaaagaactggttaagaacgtgggtaaccctcacagcaaacccatcagtgtgaaaataagactcttggacaccaagcaagacactctacagctcgtcaaacgtctgtgtgccacgggcatcacaaatcttacagttcactgcaggaagactgaaatgagaaacagagagcagcccatcacagattacattgcggagatctacgagatatgccaggcaaataacgtgtcgttgattgtgaacggcgctatccgcgaccgctctcattttcatgatttacaagcgaatcattggaaaaacactaacattggtggtatgattgcagagtgtgctgaacgggaccctacagtttttgatcacacttctaagccttcagaagacggtccatcttgggtcgttgcttgtcgcgagtttattcagtgggcaacgaagtttgacaaccacatcggcaatacaaaatacatgttaagcagaattgtccccggaaaatcagtcttttttcagtactttgcccgttgcaagagcccggaagaagttagtttcgtactaaagcaattgaacgatgatggaagcgctcaaacagatccttcagagtacttggaaaactgcagagctcaagaaaaagctttgaaaaacgccaacgccatcgccaagcaaaagaggaaacagaccgatcacataggcagtgacactaaaaagcaaaaggttgtaccccttcccacagatatataa

SEQ ID NO: 125 - DNA, 1656 bp, Saccharomyces cerevisiae
atgacctattctacagttagcatcaacacgcctccaccatatcttactttagcctgcaacgaaaagttgccaacagttttatccattgctggaacagatccaagtggtggagccggtatcgaagctgatgtcaaaactatcacagcacacagatgttatgccatgacatgtatcactgctttaaatgctcaaactccagttaaagtctacagcataaataacacaccaaaagaagtggttttccaaactttggaatccaatttaaaggatatgaaatgtaatgttatcaaaaccggtatgcttaccgcagctgctatcgaagtcttgcacgaaaaactgctgcaactcggcgaaaatagacctaagttggttgttgatccagttcttgtcgctacttctggttcttctttagctggaaaggatatagttagtttgattacggagaaggttgcaccttttgctgatattttgactcctaacatcccagagtgttacaaattgttaggtgaggaaagaaaggttaacggattacaggatattttccaaatcgcaaaagaccttgctaaaataaccaagtgttcgaatatactagtgaagggtggccatattccatggaatgatgaaaaggaaaagtacattaccgacgttcttttcttgggtgctgaacaaaaattcattatctttaaaggcaatttcgttaacaccacgcatacacatggtactgggtgcacactagcttctgccattgcatcaaacttggctcgtggttattctcttcctcagtctgtttatggtggtattgaatacgtccaaaatgccgtggcaattggttgtgatgtcacaaaagaaactgtcaaggataatggaccaattaatcatgtttacgccgtggaaattccattggagaaaatgctcagtgatgaatgttttactgcatcggatgttatacctaaaaagccgctcaaaagtgctgctgacaaaatcccaggcggtaatttctatgaatacctgatcaatcaccctaaagttaagccacactgggattcctatattaaccatgagtttgttaaaaaggttgcggacggtacattagaacgtaagaagtttcagttctttattgaacaagattatgcatacttggttgattatgctagagttcattgtatcgcgggtagtaaagctccatgcctagaagatatggaaaaggagctagtcattgttggaggtgttcgtactgaaatgggtcaacatgaaaagagattaaaagaagtatttggtgttaaagatcctgattactttcaaaagattaagagaggacctgcattaagagcttactctcgttactttaacgatgtttccagaagaggtaactggcaagaattggttgcatcccttactccttgtttgatgggttatggtgaagctttaactaaaatgaagggtaaagtcaccgcacctgaagggtccgtttaccacgaatggtgtgaaacttacgcatcttcatggtatcgtgaagccatggatgaaggtgaaaaacttttgaaccacatcttagaaacataccctccagagcaacttgacactttagtaacaatctacgctgaagtttgtgaattagaaacaaatttttggaccgctgcgctagaatacgagtag

SEQ ID NO: 126 - DNA, 1452 bp, Saccharomyces cerevisiae
atgctttctgcaaccaaacaaacatttagaagtctacagataagaactatgtccacgaacaccaagcattacgattacctcgtcatcgggggtggctcagggggtgttgcttccgcaagaagagctgcatcttatggtgcgaagacattactagttgaagctaaggctcttggtggtacctgtgttaacgtgggttgtgttccgaagaaagtcatgtggtatgcttctgacctcgctactagagtatcccatgcaaatgaatatggattatatcagaatcttccattagataaagagcatttgacttttaattggccagaatttaagcagaaaagggatgcttatgtccataggttgaacggtatataccagaagaatttagaaaaagaaaaagtggatgttgtatttggatgggctagattcaataaggacggtaatgttgaagttcagaaaagggataatactactgaagtttactccgctaaccatattttagttgcgaccggtggaaaggctattttccccgaaaacattccaggtttcgaattaggtactgattctgatgggttctttagattggaagaacaacctaagaaagttgttgttgttggcgctggttatattggtattgagctagcaggtgtgttccatgggctgggatccgaaacgcacttggtaattagaggtgaaactgtcttgagaaaatttgatgaatgcatccagaacactattactgaccattacgtaaaggaaggcatcaacgttcataaactatccaaaattgttaaggtggagaaaaatgtagaaactgacaaactgaaaatacatatgaatgactcaaagtccatcgatgacgttgacgaattaatttggacaattggacgtaaatcccatctaggtatgggttcagaaaatgtaggtataaagctgaactctcatgaccaaataattgctgatgaatatcagaacaccaatgttccaaacatttattctctaggtgacgttgttggaaaagttgaattgacacctgtcgctattgcagcgggcagaaagctgtctaatagactgtttggtccagagaaattccgtaatgacaaactagattacgagaacgtccccagcgtaattttctcacatcctgaagccggttccattggtatttctgagaaggaagccattgaaaagtacggtaaggagaatataaaggtctacaattccaaatttaccgccatgtactatgctatgttgagtgagaaatcacccacaagatataaaattgtttgtgcgggaccaaatgaaaaggttgtcggtctgcacattgttggtgattcctctgcagaaatcttgcaagggttcggtgttgctataaagatgggtgccactaaggctgatttcgataattgtgttgctattcatccgactagcgcagaagaattggttactatgagatga

SEQ ID NO: 127 - DNA, 1356 bp, Saccharomyces cerevisiae
atggacggaaatgatcacaaagtcgaaaatttaggagatgtagacaaattttattccagaatacgctggaataaccaattttcatatatggccactctgccgccccacctacaaagcgaaatggaaggtcagaaatcattgctaatgcgatatgatacttataggaaggaaagttcttcttttagtggtgaaggcaagaaagttactctgcagcatgttcctacagatttttcagaagcatcacaagcagtgattagcaagaaagatcacgatacgcatgcatctgcttttgtgaataaaattttccaaccagaggttgctgaagaacttatagttaatcgatacgaaaaacttctgtcacaaaggccggaatggcatgcaccctggaaactttcacgcgttatcaatggccatcttggatgggtacgatgcgttgcaatcgatcctgttgacaacgaatggttcatcaccggaagtaatgatacgacaatgaaagtttgggatcttgcaacaggaaaattaaaaactaccttagcagggcatgtaatgacagtgagagacgttgctgtgtcagatcgacatccttatttattttctgttagtgaagataagacggtcaaatgctgggacctagagaaaaaccaaattattagagattactatggacatttatcgggggttcgtacggtgagcatacatccaacgctggatctcatagctaccgcaggccgagatagcgttatcaaactctgggatatgagaaccagaatacctgttattacactagttgggcataagggtccaatcaatcaagtacagtgtactccagtagaccctcaagtggtgagttcatcgactgatgctacggtaaggttatgggatgtagttgctgggaaaacaatgaaagttctaacacatcataagaggtctgtgagagctacagcgttgcatcctaaggagttttcggtggcttctgcgtgtactgatgacatcagatcatggggattagcagaggggtctttactcaccaattttgagtctgaaaagacaggcataatcaatactttaagcattaatcaagatgatgtattattcgctggcggtgacaatggtgtgctttccttttatgattataagtctggtcacaaataccaatcgttggccacgagagaaatggtaggctctctggaaggtgaacggagtgttctttgtagcactttcgataaaacaggtttaagattaatcactggagaagcagacaaaagcataaagatttggaaacaggatgagacggctacaaaagagtcagaaccggggctagcgtggaaccccaacttaagcgccaaaagattttag

SEQ ID NO: 128 - DNA, 414 bp, Saccharomyces cerevisiae
atgaagagaaatattatttattatacattgagattattgccacacggaataatgttagttcatagccttaaccaatttattgatgaattcttcacggttaccgaaagaaccaccttggatgaaatgcttgaactttcttgggacaccccaaccaccagatgggttggacaacttgaatggccacaaaaagttgttagcttgcttgaagtgtggaccaacagtgatgatttcgtgaatcaaatcgtcaatggacaagataccatacttacccaagttggcttcgatgatagcattgtcggacaatggaactctttgcttgttgatcttaccgaaacctctcttgtagaccaattgtctaatagtagagtaggatgggtaaccgtaagcaacgtatggttcaatcaacttcaatag

SEQ ID NO: 129 - DNA, 1350 bp, Saccharomyces cerevisiae
atgctacggataagtattgactctatcaagcaattcggttcctttgtgacaggttataacaacactagttaccatgctgccgggagggccataagaacatcaagcctgtacagtacaatgatctcagccaacccgagaaggtgcctgcattcttcgaaactgctaaataaagaaggtcaagaagagggctataatgaacagctcatttcaaaaatgtcttcacagaatggatcgaattccagacagaatgaaagtgaaggaaagaaggaaggcaaggcttcctctgtgaagtcgttgttgcaacatactcatagtcacagccacacacatatgcatgacaatcctttattgtcactgaacgtacagcagatcaagaagaatcctggcgtaagaataacatggataggacttgcatcaaatgtggggatggcagtaggaaaatttgtaggaggaatcacttttcattctcaagcattacttgctgattccgtacatgctcttagcgatttggtatctgattttttaacactgttttctgtccaatatgcgtctcgtaaaccaacttcggagtacccatatggctatggtaaagtggaaactgtgggatctttggcagtatccacaatcttagcaatggctggtatatctatcggttggtcgtcgttatgcgctattgtggggcctgtcattcctcatgccattctagaatcgatggccggtttaattggtgaaacgcattcccattctcagtcgctaacacaacaggcaactaatgtaaatgctgtatggatagcagcgggttctatcttggttaaagaatgggtttttcaggcaacaaagaaagttgcaatccaaacaaattctaatgtactaatggcaaacgcctggcatcatcgtgttgactccttgacatcgttggtagcgttggtcgctatcacatctagttattttttcaacattcaatccttagataatttaggtgggcttgtagtgtcaggtttgatcataaaaacaggtggacaaggtatcttatcctcactgaaggagttagttgaccaatctataccacctactgatccgcgttatctagaaatcgaatctgtcataaaagacagcattggcagtttgaaaacagacttagatctcaaacagtcgttacatgttagagaccttactatattagcttccggtcctaatcttcgtgccaccacaactttggaagtgccagtattacattcaggtcaggaagttgggataagatttttggaaaacgctatttcgactataagagaggatttacgtatgaaggtgccaaacgtgggaaggtggacgtcgagtttgttgatgtaa

SEQ ID NO: 130 - DNA, 3198 bp, Saccharomyces cerevisiae
atggattacctaaaaccagcgcagaaggggagaagacgtggtctttccataaacagtctttcggagactcagcaatctgctatgaatagttccctggaccatcttcagaatgacttaaacaggataaatcttcaatggaatagaatactgtcggataacactaatcccttagaactagcgctcgcatttttggatgatacatctgtaggtctgggccaccggtatgaagaattcaatcaattaaagtcacaaattggtagtcacttacaagatgttgttaatgaacatagccaagtgttcaacactaatgtggcttcttacggaaaagcagtcagttcgatcatgcaggcccaagaacagactttaaatctgaaaaattgtttaaaggaagctaatgagaaaatcaccactgataaaggttctttacaggaattaaatgataataacttgaagtatacaaaaatgattgatgttttagtcaatattgaggagttattacagatacccgaaaaaattgaggagaacattagaaaggaaaatttccatcaggtgcaaattctcctagaaaggggtttcatattaatgaacaacaaatctttgaagacagtggagattttaaagcctataaaccaacaacttgagttacaagaacatttacttttcaacaatctgattgaagaaattcacgacattatgtactccaaatctaacaaaacaaattttactcgagtaaccaataatgatatattcaaaatcataagcatttcacataatggatttacgagtttagaaaattacctgtacaacatagtcaatattgatattatggaacactcaaaaacgataaacaagaaccttgaacaattcattcatgaccaatcgttaaataaaggaaatatcatgctacaagaaaatgctgcgactcaagcaccattggcaccatctagaaaccaagaaaacgaaggatttaacagaatagggttcctactaaaaaccataaataacatcaataaattacctgttgcattcaatataataacagaaagggctaaagaggagattcataatataattgttaaaagtaccgaatcaatacgttcgaagcacccttctctgcttaaaatggctactagtttaaagaatgacaaccattttggcctacccgtacaggatatactatcgatcattttaagggaatgcttttgggaaatatttttgaaattactgtatgctattcagtgccatagggctatttttgaaatgtcaaacattttgcagccaacgtcttccgcaaagccagctttcaagttcaataaaatttggggcaaactgttagatgaaatagaattattacttgtgaggtacatcaatgaccctgaattgatatccagcaataacggtagtattaaaccaattaatggcgcgacaaataacgcacccactttacctaaaaggaaaaatcctaaaattttttctttggagtataacattgaggacaattcttctgtaaaggatcaagcttttgaactaaaggctttgttgaaagatatattccctggattttctgtctcctcaaacatggatttagactctatttatgtaaaagatgaatccttcgaacaagatgagcctctagtccctccttctgttttcaacatgaaggtaattttagatccgtttttgctgtttacgcaatcgacatctacaattgttcccagtgtcttaacacaaaatactatttcatccctaacctttttcgatgattatatgaataaaagttttctcccaaagattcagatgactatggattatttattcacggttgaagtagaatccaataatccgtacgccttagagctatccgatgaaaatcataacatttttaaaacagcattagattttcaaaggttattttacaatttattgaatgttttcaacacagcaaacacatttagagaaaaaatatcgtactgcattctagatcttttgaatcatttttataattactacttggggctatttaattccttgattggtacttctgatagacatttaactaggaaaataattacggcatggttgcagaatggtattttgatggatcaagaacaaaaaattctgaatggggatgagacactctttcatgaagaatccatagagttatttaaggaaatacctcatttctatcaagcgggtaaaggtttgagcaaatctgatttattcaataacttgacattggacacaattctgcagttttcggcaagcgtgttatggatattaaactggctgccaggcttaaaaaaggctatcaatattgatgaagtaagccaagaacccatgttagatgctgatagattaaggagcagctggacattttctgaatcaatggatttaaactattcgaaccctagttccagcccaaattcattaggaaatctaaaaattttattggatgataaagcctccaaaaaatttgatgagactatcgacggattcaaaaccttgaaattcaaactaatcactatactgaggttcaacattagggccttgtgtatatacgacatcgggtctttttttcaaaacaccaaaatttggaatatggatgtgggtagtattgaattagatcaaaatatagcttctctaatttccgaattaagaaggactgaaagcaaattgaaacaacagttaccagaaaaggaaaaaaactccatatttattggtcttgatatagtcaacaactacgccttgattaagggtgccaaatccataaaagttttgaaccataacgggataaagaaaatgttgagaaatgtaaatgtcttacaacatgcctatagaaatctttcttctgaaccatcaaaaattaatatgaacgtcacaatgaatttttactctttatgcggctccagtgaagctgaactatttgaatatataaaagacaatgaattaccgcattgttctgtcgaagatttgaaaaccatattgaggctgcagtttagcgaggaaatgcatcgtcaattgaagagacaaagcactagctcaactaagggttccataaaaccttccaataagaggtacactgaagctttggagaaactaagtaacctcgaaaaagagcagtcgaaagaaggagcccgcaccaagattggaaaacttaaaagcaaattgaatgctgtccatactgcaaacgaaaaatga

SEQ ID NO: 131 - protein, 313 aa, Escherichia coli
MKLIRGIHNLSQAPQEGCVLTIGNFDGVHRGHRALLQGLQEEGRKRNLPVMVMLFEPQPLELFATDKAPARLTRLREKLRYLAECGVDYVLCVRFDRRFAALTAQNFISDLLVKHLRVKFLAVGDDFRFGAGREGDFLLLQKAGMEYGFDITSTQTFCEGGVRISSTAVRQALADDNLALAESLLGHPFAISGRVVHGDELGRTIGFPTANVPLRRQVSPVKGVYAVEVLGLGEKPLPGVANIGTRPTVAGIRQQLEVHLLDVAMDLYGRHIQVVLRKKIRNEQRFASLDELKAQIARDELTAREFFGLTKPA

SEQ ID NO: 132 - protein, 231 aa, Escherichia coli
MLEDLKRQVLEANLALPKHNLVTLTWGNVSAVDRERGVFVIKPSGVDYSVMTADDMVVVSIETGEVVEGTKKPSSDTPTHRLLYQAFPSIGGIVHTHSRHATIWAQAGQSIPATGTTHADYFYGTIPCTRKMTDAEINGEYEWETGNVIVETFEKQGIDAAQMPGVLVHSHGPFAWGKNAEDAVHNAIVLEEVAYMGIFCRQLAPQLPDMQQTLLDKHYLRKHGAKAYYGQ

SEQ ID NO: 133 - protein, 194 aa, Escherichia coli
MSKKLGFALSGLMLAMVAGTASADMDGGQLNISGLVVDNTCETRVDGGNKDGLILLQTATVGEIDAGVLNDTVGAKAKPFSITVDCSKANPNPGSTAKMTFGSVFFGNSKGTLNNDMSINNPSDGVNIALHNIDGSTIKQVQINNPGDVYTKALDATTKSAVYDFKASYVRAVADQTATAGYVKTNTAYTITYQ

SEQ ID NO: 134 - protein, 308 aa, Escherichia coli
MLPPYFLFKEMTDTQYIGRFAPSPSGELHFGSLIAALGSYLQARARQGRWLVRIEDIDPPREVPGAAETILRQLEHYGLHWDGDVLWQSQRHDAYREALAWLHEQGLSYYCTCTRARIQSIGGIYDGHCRVLHHGPDNAAVRIRQQHPVTQFTDQLRGIIHADEKLAREDFIIHRRDGLFAYNLAVVVDDHFQGVTEIVRGADLIEPTVRQISLYQLFGWKVPDYIHLPLALNPQGAKLSKQNHAPALPKGDPRPVLIAALQFLGQQAEAHWQDFSVEQILQSAVKNWRLTAVPESAIVNSTFSNASC

SEQ ID NO: 135 - protein, 824 aa, Escherichia coli
MLQCGAKNVNPLERFVSSLPVAAVLPELLTALDCAPQVLLSAPTGAGKSTWLPLQLLAHPGINGKIILLEPRRLAARNVAQRLAELLNEKPGDTVGYRMRAQNCVGPNTRLEVVTEGVLTRMIQRDPELSGVGLVILDEFHERSLQADLALALLLDVQQGLRDDLKLLIMSATLDNDRLQQMLPEAPVVISEGRSFPVERRYLPLPAHQRFDDAVAVATAEMLRQESGSLLLFLPGVGEIQRVQEQLASRIGSDVLLCPLYGALSLNDQRKAILPAPQGMRKVVLATNIAETSLTIEGIRLVVDCAQERVARFDPRTGLTRLITQRVSQASMTQRAGRAGRLEPGISLHLIAKEQAERAAAQSEPEILQSDLSGLLMELLQWGCSDPAQMSWLDQPPVVNLLAAKRLLQMLGALEGERLSAQGQKMAALGNDPRLAAMLVSAKNDDEAATAAKIAAILEEPPRMGNSDLGVAFSRNQPAWQQRSQQLLKRLNVRGGEADSSLIAPLLAGAFADRIARRRGQDGRYQLANGMGAMLDANDALSRHEWLIAPLLLQGSASPDARILLALLVDIDELVQRCPQLVQQSDTVEWDDAQGTLKAWRRLQIGQLTVKVQPLAKPSEDELHQAMLNGIRDKGLSVLNWTAEAEQLRLRLLCAAKWLPEYDWPAVDDESLLAALETWLLPHMTGVHSLRGLKSLDIYQALRGLLDWGMQQRLDSELPAHYTVPTGSRIAIRYHEDNPPALAVRMQEMFGEATNPTIAQGRVPLVLELLSPAQRPLQITRDLSDFWKGAYREVQKEMKGRYPKHVWPDDPANTAPTRRTKKYS

SEQ ID NO: 136 - protein, 201 aa, Escherichia coli
MSIKNLPADYLLAAQQGDIDKVKTCLALGVDINTCDRQGKTAITLASLYQQYACVQALIDAGADINKQDHTCLNPFLISCLNDDLTLLRIILPAKPDLNCVTRFGGVGLTPACEKGHLSIVKELLAHTEINVNQTNHVGWTPLLEAIVLNDGGIKQQAIVQLLLEHGASPHLTDKYGKTPLELARERGFEEIAQLLIAAGA

SEQ ID NO: 137 - protein, 223 aa, Escherichia coli
MMQLVHLFMDEITMDPLHAVYLTVGLFVITFFNPGANLFVVVQTSLASGRRAGVLTGLGVALGDAFYSGLGLFGLATLITQCEEIFSLIRIVGGAYLLWFAWCSMRRQSTPQMSTLQQPISAPWYVFFRRGLITDLSNPQTVLFFISIFSVTLNAETPTWARLMAWAGIVLASIIWRVFLSQAFSLPAVRRAYGRMQRVASRVIGAIIGVFALRLIYEGVTQR

SEQ ID NO: 138 - protein, 301 aa, Escherichia coli
MDSARALIARGWGVSLVSRCLRVSRAQLHVILRRTDDWMDGRRSRHTDDTDVLLRIHHVIGELPTYGYRRVWALLRRQAELDGMPAINAKRVYRIMRQNALLLERKPAVPPSKRAHTGRVAVKESNQRWCSDGFEFCCDNGERLRVTFALDCCDREALHWAVTTGGFNSETVQDVMLGAVERRFGNDLPSSPVEWLTDNGSCYRANETRQFARMLGLEPKNTAVRSPESNGIAESFVKTIKRDYISIMPKPDGLTAAKNLAEAFEHYNEWHPHSALGYRSPREYLRQRACNGLSDNRCLEI

SEQ ID NO: 139 - protein, 588 aa, Escherichia coli
MKLPVREFDAVVIGAGGAGMRAALQISQSGQTCALLSKVFPTRSHTVSAQGGITVALGNTHEDNWEWHMYDTVKGSDYIGDQDAIEYMCKTGPEAILELEHMGLPFSRLDDGRIYQRPFGGQSKNFGGEQAARTAAAADRTGHALLHTLYQQNLKNHTTIFSEWYALDLVKNQDGAVVGCTALCIETGEVVYFKARATVLATGGAGRIYQSTTNAHINTGDGVGMAIRAGVPVQDMEMWQFHPTGIAGAGVLVTEGCRGEGGYLLNKHGERFMERYAPNAKDLAGRDVVARSIMIEIREGRGCDGPWGPHAKLKLDHLGKEVLESRLPGILELSRTFAHVDPVKEPIPVIPTCHYMMGGIPTKVTGQALTVNEKGEDVVVPGLFAVGEIACVSVHGANRLGGNSLLDLVVFGRAAGLHLQESIAEQGALRDASESDVEASLDRLNRWNNNRNGEDPVAIRKALQECMQHNFSVFREGDAMAKGLEQLKVIRERLKNARLDDTSSEFNTQRVECLELDNLMETAYATAVSANFRTESRGAHSRFDFPDRDDENWLCHSLYLPESESMTRRSVNMEPKLRPAFPPKIRTY

SEQ ID NO: 140 - protein, 933 aa, Escherichia coli
MQNSALKAWLDSSYLSGANQSWIEQLYEDFLTDPDSVDANWRSTFQQLPGTGVKPDQFHSQTREYFRRLAKDASRYSSTISDPDTNVKQVKVLQLINAYRFRGHQHANLDPLGLWQQDKVADLDPSFHDLTEADFQETFNVGSFASGKETMKLGELLEALKQTYCGPIGAEYMHITSTEEKRWIQQRIESGRATFNSEEKKRFLSELTAAEGLERYLGAKFPGAKRFSLEGGDALIPMLKEMIRHAGNSGTREVVLGMAHRGRLNVLVNVLGKKPQDLFDEFAGKHKEHLGTGDVKYHMGFSSDFQTDGGLVHLALAFNPSHLEIVSPVVIGSVRARLDRLDEPSSNKVLPITIHGDAAVTGQGVVQETLNMSKARGYEVGGTVRIVINNQVGFTTSNPLDARSTPYCTDIGKMVQAPIFHVNADDPEAVAFVTRLALDFRNTFKRDVFIDLVCYRRHGHNEADEPSATQPLMYQKIKKHPTPRKIYADKLEQEKVATLEDATEMVNLYRDALDAGDCVVAEWRPMNMHSFTWSPYLNHEWDEEYPNKVEMKRLQELAKRISTVPEAVEMQSRVAKIYGDRQAMAAGEKLFDWGGAENLAYATLVDEGIPVRLSGEDSGRGTFFHRHAVIHNQSNGSTYTPLQHIHNGQGAFRVWDSVLSEEAVLAFEYGYATAEPRTLTIWEAQFGDFANGAQVVIDQFISSGEQKWGRMCGLVMLLPHGYEGQGPEHSSARLERYLQLCAEQNMQVCVPSTPAQVYHMLRRQALRGMRRPLVVMSPKSLLRHPLAVSSLEELANGTFLPAIGEIDELDPKGVKRVVMCSGKVYYDLLEQRRKNNQHDVAIVRIEQLYPFPHKAMQEVLQQFAHVKDFVWCQEEPLNQGAWYCSQHHFREVIPFGASLRYAGRPASASPAVGYMSVHQKQQQDLVNDALNVE

SEQ ID NO: 141 - protein, 74 aa, Escherichia coli
MEKGTVKWFNNAKGFGFICPEGGGEDIFAHYSTIQMDGYRTLKAGQSVQFDVHQGPKGNHASVIVPVEVEAAVA

SEQ ID NO: 142 - protein, 511 aa, Escherichia coli
MNLLKSLAAVSSMTMFSRVLGFARDAIVARIFGAGMATDAFFVAFKLPNLLRRIFAEGAFSQAFVPILAEYKSKQGEDATRVFVSYVSGLLTLALAVVTVAGMLAAPWVIMVTAPGFADTADKFALTSQLLKITFPYILLISLASLVGAILNTWNRFSIPAFAPTLLNISMIGFALFAAPYFNPPVLALAWAVTVGGVLQLVYQLPHLKKIGMLVLPRINFHDAGAMRVVKQMGPAILGVSVSQISLIINTIFASFLASGSVSWMYYADRLMEFPSGVLGVALGTILLPSLSKSFASGNHDEYNRLMDWGLRLCFLLALPSAVALGILSGPLTVSLFQYGKFTAFDALMTQRALIAYSVGLIGLIVVKVLAPGFYSRQDIKTPVKIAIVTLILTQLMNLAFIGPLKHAGLSLSIGLAACLNASLLYWQLRKQKIFTPQPGWMAFLLRLVVAVLVMSGVLLGMLHIMPEWSLGTMPWRLLRLMAVVLAGIAAYFAALAVLGFKVKEFARRTV

SEQ ID NO: 143 - protein, 365 aa, Escherichia coli
MIKFLSALILLLVTTAAQAERIRDLTSVQGVRQNSLIGYGLVVGLDGTGDQTTQTPFTTQTLNNMLSQLGITVPTGTNMQLKNVAAVMVTASLPPFGRQGQTIDVVVSSMGNAKSLRGGTLLMTPLKGVDSQVYALAQGNILVGGAGASAGGSSVQVNQLNGGRITNGAVIERELPSQFGVGNTLNLQLNDEDFSMAQQIADTINRVRGYGSATALDARTIQVRVPSGNSSQVRFLADIQNMQVNVTPQDAKVVINSRTGSVVMNREVTLDSCAVAQGNLSVTVNRQANVSQPDTPFGGGQTVVTPQTQIDLRQSGGSLQSVRSSASLNNVVRALNALGATPMDLMSILQSMQSAGCLRAKLEII

SEQ ID NO: 144 - protein, 223 aa, Escherichia coli
MRVLVVEDNALLRHHLKVQIQDAGHQVDDAEDAKEADYYLNEHIPDIAIVDLGLPDEDGLSLIRRWRSNDVSLPILVLTARESWQDKVEVLSAGADDYVTKPFHIEEVMARMQALMRRNSGLASQVISLPPFQVDLSRRELSINDEVIKLTAFEYTIMETLIRNNGKVVSKDSLMLQLYPDAELRESHTIDVLMGRLRKKIQAQYPQEVITTVRGQGYLFELR

SEQ ID NO: 145 - protein, 216 aa, Escherichia coli
MSNQEPATILLIDDHPMLRTGVKQLISMAPDITVVGEASNGEQGIELAESLDPDLILLDLNMPGMNGLETLDKLREKSLSGRIVVFSVSNHEEDVVTALKRGADGYLLKDMEPEDLLKALHQAAAGEMVLSEALTPVLAASLRANRATTERDVNQLTPRERDILKLIAQGLPNKMIARRLDITESTVKVHVKHMLKKMKLKSRVEAAVWVHQERIF

SEQ ID NO: 146 - protein, 866 aa, Escherichia coli
MSTKPLFLLRKAKKSSGEPDVVLWASNDFESTCATLDYLIVKSGKKLSSYFKAVATNFPVVNDLPAEGEIDFTWSERYQLSKDSMTWELKPGAAPDNAHYQGNTNVNGEDMTEIEENMLLPISGQELPIRWLAQHGSEKPVTHVSRDGLQALHIARAEELPAVTALAVSHKTSLLDPLEIRELHKLVRDTDKVFPNPGNSNLGLITAFFEAYLNADYTDRGLLTKEWMKGNRVSHITRTASGANAGGGNLTDRGEGFVHDLTSLARDVATGVLARSMDLDIYNLHPAHAKRIEEIIAENKPPFSVFRDKFITMPGGLDYSRAIVVASVKEAPIGIEVIPAHVTEYLNKVLTETDHANPDPEIVDIACGRSSAPMPQRVTEEGKQDDEEKPQPSGTTAVEQGEAETMEPDATEHHQDTQPLDAQSQVNSVDAKYQELRAELHEARKNIPSKNPVDDDKLLAASRGEFVDGISDPNDPKWVKGIQTRDCVYQNQPETEKTSPDMNQPEPVVQQEPEIACNACGQTGGDNCPDCGAVMGDATYQETFDEESQVEAKENDPEEMEGAEHPHNENAGSDPHRDCSDETGEVADPVIVEDIEPGIYYGISNENYHAGPGISKSQLDDIADTPALYLWRKNAPVDTTKTKTLDLGTAFHCRVLEPEEFSNRFIVAPEFNRRTNAGKEEEKAFLMECASTGKTVITAEEGRKIELMYQSVMALPLGQWLVESAGHAESSIYWEDPETGILCRCRPDKIIPEFHWIMDVKTTADIQRFKTAYYDYRYHVQDAFYSDGYEAQFGVQPTFVFLVASTTIECGRYPVEIFMMGEEAKLAGQQEYHRNLRTLSDCLNTDEWPAIKTLSLPRWAKEYAND

SEQ ID NO: 147 - protein, 356 aa, Escherichia coli
MTTFHSLTVAKVESETRDAVTITFAVPQPLQEAYRFRPGQHLTLKASFDGEELRRCYSICRSYLPGEISVAVKAIEGGRFSRYAREHIRQGMTLEVMVPQGHFGYQPQAERQGRYLAIAAGSGITPMLAIIATTLQTEPESQFTLIYGNRTSQSMMFRQALADLKDKYPQRLQLLCIFSQETLDSDLLHGRIDGEKLQSLGASLINFRLYDEAFICGPAAMMDDAETALKALGMPDKTIHLERFNTPGTRVKRSVNVQSDGQKVTVRQDGRDREIVLNADDESILDAALRQGADLPYACKGGVCATCKCKVLRGKVAMETNYSLEPDELAAGYVLSCQALPLTSDVVVDFDAKGMA

SEQ ID NO: 148 - protein, 71 aa, Escherichia coli
MSNKMTGLVKWFNADKGFGFISPVDGSKDVFVHFSAIQNDNYRTLFEGQKVTFSIESGAKGPAAANVIITD

SEQ ID NO: 149 - protein, 365 aa, Escherichia coli
MSSEKLYSPLKVGAITAANRIFMAPLTRLRSIEPGDIPTPLMAEYYRQRASAGLIISEATQISAQAKGYAGAPGIHSPEQIAAWKKITAGVHAENGHMAVQLWHTGRISHASLQPGGQAPVAPSALSAGTRTSLRDENGQAIRVETSMPRALELEEIPGIVNDFRQAIANAREAGFDLVELHSAHGYLLHQFLSPSSNHRTDQYGGSVENRARLVLEVVDAGIEEWGADRIGIRVSPIGTFQNTDNGPNEEADALYLIEQLGKRGIAYLHMSEPDWAGGEPYTDAFREKVRARFHGPIIGAGAYTVEKAETLIGKGLIDAVAFGRDWIANPDLVARLQRKAELNPQRAESFYGGGAEGYTDYPTL

SEQ ID NO: 150 - protein, 65 aa, Escherichia coli [sequence omitted]

SEQ ID NO: 151 - protein, 331 aa, Escherichia coli
MTIKVGINGFGRIGRIVFRAAQKRSDIEIVAINDLLDADYMAYMLKYDSTHGRFDGTVEVKDGHLIVNGKKIRVTAERDPANLKWDEVGVDVVAEATGLFLTDETARKHITAGAKKVVMTGPSKDNTPMFVKGANFDKYAGQDIVSNASCTTNCLAPLAKVINDNFGIIEGLMTTVHATTATQKTVDGPSHKDWRGGRGASQNIIPSSTGAAKAVGKVLPELNGKLTGMAFRVPTPNVSVVDLTVRLEKAATYEQIKAAVKAAAEGEMKGVLGYTEDDVVSTDFNGEVCTSVFDAKAGIALNDNFVKLVSWYDNETGYSNKVLDLIAHISK

SEQ ID NO: 152 - protein, 416 aa, Escherichia coli
MDIMRSVVGMVVLLAIAFLLSVNKKSISLRTVGAALLLQIAIGGIMLYFPPGKWAVEQAALGVHKVMSYSDAGSAFIFGSLVGPKMDVLFDGAGFIFAFRVLPAIIFVTALISLLYYIGVMGLLIRILGSIFQKALNISKIESFVAVTTIFLGQNEIPAIVKPFIDRMNRNELFTAICSGMASIAGSMMIGYAGMGVPIDYLLAASLMAIPGGILFARILSPATEPSQVTFENLSFSETPPKSFIEAAASGAMTGLKIAAGVATVVMAFVAIIALINGIIGGIGGWFGFANASLESIFGYVLAPLAWIMGVDWSDANLAGSLIGQKLAINEFVAYLSFSPYLQTGGTLEVKTIAIISFALCGFANFGSIGVVVGAFSAISPKRAPEIAQLGLRALAAATLSNLMSATIAGFFIGLA

SEQ ID NO: 153 - protein, 350 aa, Escherichia coli
MRFLLGVLMLMISGSALATIDVLQFKDEAQEQQFRQLTEELRCPKCQNNSIADSNSMIATDLRQKVYELMQEGKSKKEIVDYMVARYGNFVTYDPPLTPLTVLLWVLPVVAIGIGGWVIYARSRRRVRVVPEAFPEQSVPEGKRAGYVVYLPGIVVALIVAGVSYYQTGNYQQVKIWQQATAQAPALLDRALDPKADPLNEEEMSRLALGMRTQLQKNPGDIEGWIMLGRVGMALGNASIATDAYATAYRLDPKNSDAALGYAEALTRSSDPNDNRLGGELLRQLVRTDHSNIRVLSMYAFNAFEQQRFGEAVAAWEMMLKLLPANDTRRAVIERSIAQAMQHLSPQESK

SEQ ID NO: 154 - protein, 159 aa, Escherichia coli
MNIRRKNRLWIACAVLAGLALTIGLVLYALRSNIDLFYTPGEILYGKRETQQMPEVGQRLRVGGMVMPGSVQRDPNSLKVTFTIYDAEGSVDVSYEGILPDLFREGQGVVVQGELEKGNHILAKEVLAKHDENYTPPEVEKAMEANHRRPASVYKDPAS

SEQ ID NO: 155 - protein, 875 aa, Escherichia coli
MSDLAREITPVNIEEELKSSYLDYAMSVIVGRALPDVRDGLKPVHRRVLYAMNVLGNDWNKAYKKSARVVGDVIGKYHPHGDSAVYDTIVRMAQPFSLRYMLVDGQGNFGSIDGDSAAAMRYTEIRLAKIAHELMADLEKETVDFVDNYDGTEKIPDVMPTKIPNLLVNGSSGIAVGMATNIPPHNLTEVINGCLAYIDDEDISIEGLMEHIPGPDFPTAAIINGRRGIEEAYRTGRGKVYIRARAEVEVDAKTGRETIIVHEIPYQVNKARLIEKIAELVKEKRVEGISALRDESDKDGMRIVIEVKRDAVGEVVLNNLYSQTQLQVSFGINMVALHHGQPKIMNLKDIIAAFVRHRREVVTRRTIFELRKARDRAHILEALAVALANIDPIIELIRHAPTPAEAKTALVANPWQLGNVAAMLERAGDDAARPEWLEPEFGVRDGLYYLTEQQAQAILDLRLQKLTGLEHEKLLDEYKELLDQIAELLRILGSADRLMEVIREELELVREQFGDKRRTEITANSADINLEDLITQEDVVVTLSHQGYVKYQPLSEYEAQRRGGKGKSAARIKEEDFIDRLLVANTHDHILCFSSRGRVYSMKVYQLPEATRGARGRPIVNLLPLEQDERITAILPVTEFEEGVKVFMATANGTVKKTVLTEFNRLRTAGKVAIKLVDGDELIGVDLTSGEDEVMLFSAEGKVVRFKESSVRAMGCNTTGVRGIRLGEGDKVVSLIVPRGDGAILTATQNGYGKRTAVAEYPTKSRATKGVISIKVTERNGLVVGAVQVDDCDQIMMITDAGTLVRTRVSEISIVGRNTQGVILIRTAEDENVVGLQRVAEPVDEEDLDTIDGSAAEGDDEIAPEVDVDDEPEEE

SEQ ID NO: 156 - protein, 442 aa, Escherichia coli
MTTVTPTYSKELFMSTALLDAVVKKNRVRLIPFMLALYVLAFLDRSNIGFAKQTYQIDTGLSNEAYALGAGIFFVVYAFLGVPANLLMRKLGARTWIGTTTLLWGFLSAAMAWADTEAKFLIVRTLLRAAEAGFFPGMIYLTSQWFPQRNRASIMGLFYMGAPLALTLGSPLSGALLEMHGFMGHPGWFWMFVIEGLLAVGAGVFTFFWLDDTPEQARFLSKQEKTLLINQLASEEQQKVTSRLSDALRNGRVWQLAIIYLTIQVAVYGLIFFLPTQVAALLGTKVGFTASVVTAIPWVAALFGTWLIPRYSDKTGERRNVAALTLLAAGIGIGLSGLLSPVMAIVALCVAAIGFIAVQPVFWTMPTQLLSGTALAAGIGFVNLFGAVGGFIAPILRVKAETLFASDAAGLLTLAAVAVIGSLIIFTLRVNRTVAQTDVAHH

SEQ ID NO: 157 - protein, 220 aa, Escherichia coli
MDYTLTRIDPNGENDRYPLQKQEIVTDPLEQEVNKNVFMGKLNDMVNWGRKNSIWPYNFGLSCCYVEMVTSFTAVHDVARFGAEVLRASPRQADLMVVAGTCFTKMAPVIQRLYDQMLEPKWVISMGACANSGGMYDIYSVVQGVDKFIPVDVYIPGCPPRPEAYMQALMLLQESIGKERRPLSWVVGDQGVYRANMQSERERKRGERIAVTNLRTPDEI

SEQ ID NO: 158 - protein, 181 aa, Escherichia coli
MLKLLKTIMRAGTATVKYPFAPLEVSPGFRGKPDLMPSQCIACGACACACPANALTIQTDDQQNSRTWQLYLGRCIYCGRCEEVCPTRAIQLTNNFELTVTNKADLYTRATFHLQRCSRCERPFAPQKTIALAAELLAQQQNAPQNREMLWAQASVCPECKQRATLINDDTDVLLVAKEQL

SEQ ID NO: 159 - protein, 353 aa, Escherichia coli
MAIDENKQKALAAALGQIEKQFGKGSIMRLGEDRSMDVETISTGSLSLDIALGAGGLPMGRIVEIYGPESSGKTTLTLQVIAAAQREGKTCAFIDAEHALDPIYARKLGVDIDNLLCSQPDTGEQALEICDALARSGAVDVIVVDSVAALTPKAEIEGEIGDSHMGLAARMMSQAMRKLAGNLKQSNTLLIFINQIRMKIGVMFGNPETTTGGNALKFYASVRLDIRRIGAVKEGENVVGSETRVKVVKNKIAAPFKQAEFQILYGEGINFYGELVDLGVKEKLIEKAGAWYSYKGEKIGQGKANATAWLKDNPETAKEIEKKVRELLLSNPNSTPDFSVDDSEGVAETNEDF

SEQ ID NO: 160 - protein, 853 aa, Escherichia coli
MSAIENFDAHTPMMQQYLRLKAQHPEILLFYRMGDFYELFYDDAKRASQLLDISLTKRGASAGEPIPMAGIPYHAVENYLAKLVNQGESVAICEQIGDPATSKGPVERKVVRIVTPGTISDEALLQERQDNLLAAIWQDSKGFGYATLDISSGRFRLSEPADRETMAAELQRTNPAELLYAEDFAEMSLIEGRRGLRRRPLWEFEIDTARQQLNLQFGTRDLVGFGVENAPRGLCAAGCLLQYAKDTQRTTLPHIRSITMEREQDSIIMDAATRRNLEITQNLAGGAENTLASVLDCTVTPMGSRMLKRWLHMPVRDTRVLLERQQTIGALQDFTAGLQPVLRQVGDLERILARLALRTARPRDLARMRHAFQQLPELRAQLETVDSAPVQALREKMGEFAELRDLLERAIIDTPPVLVRDGGVIASGYNEELDEWRALADGATDYLERLEVRERERTGLDTLKVGFNAVHGYYIQISRGQSHLAPINYMRRQTLKNAERYIIPELKEYEDKVLTSKGKALALEKQLYEELFDLLLPHLEALQQSASALAELDVLVNLAERAYTLNYTCPTFIDKPGIRITEGRHPVVEQVLNEPFIANPLNLSPQRRMLIITGPNMGGKSTYMRQTALIALMAYIGSYVPAQKVEIGPIDRIFTRVGAADDLASGRSTFMVEMTETANILHNATEYSLVLMDEIGRGTSTYDGLSLAWACAENLANKIKALTLFATHYFELTQLPEKMEGVANVHLDALEHGDTIAFMHSVQDGAASKSYGLAVAALAGVPKEVIKRARQKLRELESISPNAAATQVDGTQMSLLSVPEETSPAVEALENLDPDSLTPRQALEWIYRLKSLV

SEQ ID NO: 161 - protein, 163 aa, Escherichia coli
MMKSLIIVNPADCIGCRTCEVACVVAHPSEQELNADVFLPRLKVQRLDSISAPVMCHQCENAPCVGACPVGALTMGEQVVQTNSARCIGCQSCVSACPFGMITIQSLPGDTRQQIVKCDLCEQREEGPACVESCPTQALQLLTERELRRVRQQRIVASGENPL

SEQ ID NO: 162 - protein, 387 aa, Escherichia coli
MSVIKMTDLDLAGKRVFIRADLNVPVKDGKVTSDARIRASLPTIELALKQGAKVMVTSHLGRPTEGEYNEEFSLLPVVNYLKDKLSNPVRLVKDYLDGVDVAEGELVVLENVRFNKGEKKDDETLSKKYAALCDVFVMDAFGTAHRAQASTHGIGKFADVACAGPLLAAELDALGKALKEPARPMVAIVGGSKVSTKLTVLDSLSKIADQLIVGGGIANTFIAAQGHDVGKSLYEADLVDEAKRLLTTCNIPVPSDVRVATEFSETAPATLKSVNDVKADEQILDIGDASAQELAEILKNAKTILWNGPVGVFEFPNFRKGTEIVANAIADSEAFSIAGGGDTLAAIDLFGIADKISYISTGGGAFLEFVEGKVLPAVAMLEERAKK

SEQ ID NO: 163 - protein, 254 aa, Escherichia coli
MKDERRPICEVVAESIERLIIDGVLKVGQPLPSERRLCEKLGFSRSALREGLTVLRGRGIIETAQGRDSRVARLNRVQDTSPLIHLFSTQPRTLYDLLDVRALLEGESARLAATLGTQADFVVITRCYEKMLAASENNKEISLIEHAQLDHAFHLAICQASHNQVLVFTLQSLTDLMFNSVFASVNNLYHRPQQKKQIDRQHARIYNAVLQRLPHVAQRAARDHVRTVKKNLHDIELEGHHLIRSAVPLEMNLS

SEQ ID NO: 164 - protein, 499 aa, Escherichia coli
MLNLFVGLDIYTGLLLLLALAFVLFYEAINGFHDTANAVAAVIYTRAMQPQLAVVMAAFFNFFGVLLGGLSVAYAIVHMLPTDLLLNMGSTHGLAMVFSMLLAAIIWNLGTWFFGLPASSSHTLIGAIIGIGLTNALLTGSSVMDALNLREVTKIFSSLIVSPIVGLVIAGGLIFLLRRYWSGTKKRDRIHRIPEDRKKKKGKRKPPFWTRIALIVSAAGVAFSHGANDGQKGIGLVMLVLVGIAPAGFVVNMNASGYEITRTRDAVTNFEHYLQQHPELPQKLIAMEPPLPAASTDGTQVTEFHCHPANTFDAIARVKTMLPGNMESYEPLSVSQRSQLRRIMLCISDTSAKLAKLPGVSKEDQNLLKKLRSDMLSTIEYAPVWIIMAVALALGIGTMIGWRRVAMTIGEKIGKRGMTYAQGMAAQMTAAVSIGLASYIGMPVSTTHVLSSAVAGTMVVDGGGLQRKTVTSILMAWVFTLPAAIFLSGGLYWIALQLI

SEQ ID NO: 165 - protein, 630 aa, Escherichia coli
MTQTYNADAIEVLTGLEPVRRRPGMYTDTTRPNHLGQEVIDNSVDEALAGHAKRVDVILHADQSLEVIDDGRGMPVDIHPEEGVPAVELILCRLHAGGKFSNKNYQFSGGLHGVGISVVNALSKRVEVNVRRDGQVYNIAFENGEKVQDLQVVGTCGKRNTGTSVHFWPDETFFDSPRFSVSRLTHVLKAKAVLCPGVEITFKDEINNTEQRWCYQDGLNDYLAEAVNGLPTLPEKPFIGNFAGDTEAVDWALLWLPEGGELLTESYVNLIPTMQGGTHVNGLRQGLLDAMREFCEYRNILPRGVKLSAEDIWDRCAYVLSVKMQDPQFAGQTKERLSSRQCAAFVSGVVKDAFILWLNQNVQAAELLAEMAISSAQRRMRAAKKVVRKKLTSGPALPGKLADCTAQDLNRTELFLVEGDSAGGSAKQARDREYQAIMPLKGKILNTWEVSSDEVLASQEVHDISVAIGIDPDSDDLSQLRYGKICILADADSDGLHIATLLCALFVKHFRALVKHGHVYVALPPLYRIDLGKEVYYALTEEEKEGVLEQLKRKKGKPNVQRFKGLGEMNPMQLRETTLDPNTRRLVQLTIDDEDDQRTDAMMDMLLAKKRSEDRRNWLQEKGDMAEIEV

SEQ ID NO: 166 - protein, 581 aa, Escherichia coli
MAGRIPRVFINDLLARTDIVDLIDARVKLKKQGKNFHACCPFHNEKTPSFTVNGEKQFYHCFGCGAHGNAIDFLMNYDKLEFVETVEELAAMHNLEVPFEAGSGPSQIERHQRQTLYQLMDGLNTFYQQSLQQPVATSARQYLEKRGLSHEVIARFAIGFAPPGWDNVLKRFGGNPENRQSLIDAGMLVTNDQGRSYDRFRERVMFPIRDKRGRVIGFGGRVLGNDTPKYLNSPETDIFHKGRQLYGLYEAQQDNAEPNRLLVVEGYMDVVALAQYGINYAVASLGTSTTADHIQLLFRATNNVICCYDGDRAGRDAAWRALETALPYMTDGRQLRFMFLPDGEDPDTLVRKEGKEAFEARMEQAMPLSAFLFNSLMPQVDLSTPDGRARLSTLALPLISQVPGETLRIYLRQELGNKLGILDDSQLERLMPKAAESGVSRPVPQLKRTTMRILIGLLVQNPELATLVPPLENLDENKLPGLGLFRELVNTCLSQPGLTTGQLLEHYRGTNNAATLEKLSMWDDIADKNIAEQTFTDSLNHMFDSLLELRQEELIARERTHGLSNEERLELWTLNQELAKK

SEQ ID NO: 167 - protein, 613 aa, Escherichia coli
MEQNPQSQLKLLVTRGKEQGYLTYAEVNDHLPEDIVDSDQIEDIIQMINDMGIQVMEEAPDADDLMLAENTADEDAAEAAAQVLSSVESEIGRTTDPVRMYMREMGTVELLTREGEIDIAKRIEDGINQVQCSVAEYPEAITYLLEQYDRVEAEEARLSDLITGFVDPNAEEDLAPTATHVGSELSQEDLDDDEDEDEEDGDDDSADDDNSIDPELAREKFAELRAQYVVTRDTIKAKGRSHATAQEEILKLSEVFKQFRLVPKQFDYLVNSMRVMMDRVRTQERLIMKLCVEQCKMPKKNFITLFTGNETSDTWFNAAIAMNKPWSEKLHDVSEEVHRALQKLQQIEEETGLTIEQVKDINRRMSIGEAKARRAKKEMVEANLRLVISIAKKYTNRGLQFLDLIQEGNIGLMKAVDKFEYRRGYKFSTYATWWIRQAITRSIADQARTIRIPVHMIETINKLNRISRQMLQEMGREPTPEELAERMLMPEDKIRKVLKIAKEPISMETPIGDDEDSHLGDFIEDTTLELPLDSATTESLRAATHDVLAGLTAREAKVLRMRFGIDMNTDYTLEEVGKQFDVTRERIRQIEAKALRKLRHPSRSEVLRSFLDD

SEQ ID NO: 168 - protein, 696 aa, Escherichia coli
MWRRLIYHPDINYALRQTLVLCLPVAVGLMLGELRFGLLFSLVPACCNIAGLDTPHKRFFKRLIIGASLFATCSLLTQLLLAKDVPLPFLLTGLTLVLGVTAELGPLHAKLLPASLLAAIFTLSLAGYMPVWEPLLIYALGTLWYGLFNWFWFWIWREQPLRESLSLLYRELADYCEAKYSLLTQHTDPEKALPPLLVRQQKAVDLITQCYQQMHMLSAQNNTDYKRMLRIFQEALDLQEHISVSLHQPEEVQKLVERSHAEEVIRWNAQTVAARLRVLADDILYHRLPTRFTMEKQIGALEKIARQHPDNPVGQFCYWHFSRIARVLRTQKPLYARDLLADKQRRMPLLPALKSYLSLKSPALRNAGRLSVMLSVASLMGTALHLPKSYWILMTVLLVTQNGYGATRLRIVNRSVGTVVGLIIAGVALHFKIPEGYTLTLMLITTLASYLILRKNYGWATVGFTITAVYTLQLLWLNGEQYILPRLIDTIIGCLIAFGGTVWLWPQWQSGLLRKNAHDALEAYQEAIRLILSEDPQPTPLAWQRMRVNQAHNTLYNSLNQAMQEPAFNSHYLADMKLWVTHSQFIVEHINAMTTLAREHRALPPELAQEYLQSCEIAIQRCQQRLEYDEPGSSGDANIMDAPEMQPHEGAAGTLEQHLQRVIGHLNTMHTISSMAWRQRPHHGIWLSRKLRDSKA

SEQ ID NO: 169 - protein, 258 aa, Escherichia coli
MIVLPRRLSDEVADRVRALIDEKNLEAGMKLPAERQLAMQLGVSRNSLREALAKLVSEGVLLSRRGGGTFIRWRHDTWSEQNIVQPLKTLMADDPDYSFDILEARYAIEASTAWHAAMRATPGDKEKIQLCFEATLSEDPDIASQADVRFHLAIAEASHNIVLLQTMRGFFDVLQSSVKHSRQRMYLVPPVFSQLTEQHQAVIDAIFAGDADGARKAMMAHLSFVHTTMKRFDEDQARHARITRLPGEHNEHSREKNA

SEQ ID NO: 170 - protein, 137 aa, Escherichia coli
MRNFDLSPLYRSAIGFDRLFNHLENNQSQSNGGYPPYNVELVDENHYRIAIAVAGFAESELEITAQDNLLVVKGAHADEQKERTYLYQGIAERNFERKFQLAENIHVRGANLVNGLLYIDLERVIPEAKKPRRIEIN

SEQ ID NO: 171 - protein, 298 aa, Escherichia coli
MTDLHTDVERYLRYLSVERQLSPITLLNYQRQLEAIINFASENGLQSWQQCDVTMVRNFAVRSRRKGLGAASLALRLSALRSFFDWLVSQNELKANPAKGVSAPKAPRHLPKNIDVDDMNRLLDIDINDPLAVRDRAMLEVMYGAGLRLSELVGLDIKHLDLESGEVWVMGKGSKERRLPIGRNAVAWIEHWLDLRDLFGSEDDALFLSKLGKRISARNVQKRFAEWGIKQGLNNHVHPHKLRHSFATHMLESSGDLRGVQELLGHANLSTTQIYTHLDFQHLASVYDAAHPRAKRGK

SEQ ID NO: 172 - protein, 552 aa, Escherichia coli
MLTPLTAFAGVRLRWPAMMRLTCIGILAQFALLLLAFGVLTYCFLISDFSVIYVAQHSYSLLSWELKLAAVWGGHEGSLLLWVLLLSAWSALFAWHYRQQTDPLFPLTLAVLSLMLAALLLFVVLWSDPFVRIFPPAIEGRDLNPMLQHPGLIFHPPLLYLGYGGLMVAASVALASLLRGEFDGACARICWRWALPGWSALTAGIILGSWWAYCELGWGGWWFWDPVENASLLPWLSATALLHSLSLTRQRGIFCHWSLLLAIVTLMLSLLGTLIVRSGILVSVHAFALDNVRAVPLFSLFALISLASLALYGWRARDGGPAVHFSGLSREMLILATLLLFCAVLLIVLVGTLYPMIYGLLGWGRLSVGAPYFNRATLPFGLLMLVVIVLATFVSGKRVQLPALVAHAGVLLFAAGVVVSSVSRQEISLNLQPGQQVTLAGYTFRFECLDLQAKGNYTSEKAIVALFDHQQRIGELTPERRFYEARRQQMMEPSIRWNGIHDWYAVMGEKTGPDRYAFRLYVQSGVRWIWGGGLLMIAGALLSGWRGKKRDE

SEQ ID NO: 173 - protein, 149 aa, Escherichia coli
MKKIAFGCDHVGFILKHEIVAHLVERGVEVIDKGTWSSERTDYPHYASQVALAVAGGEVDGGILICGTGVGISIAANKFAGIRAVVCSEPYSAQLSRQHNDTNVLAFGSRVVGLELAKMIVDAWLGAQYEGGRHQQRVEAITAIEQRRN

SEQ ID NO: 174 - protein, 304 aa, Escherichia coli
MTVPTYDKFIEPVLRYLATKPEGAAARDVHEAAADALGLDDSQRAKVITSGQLVYKNRAGWAHDRLKRAGLSQSLSRGKWCLTPAGFDWVASHPQPMTEQETNHLAFAFVNVKLKSRPDAVDLDPKADSPDHEELAKSSPDDRLDQALKELRDAVADEVLENLLQVSPSRFEVIVLDVLHRLGYGGHRDDLQRVGGTGDGGIDGVISLDKLGLEKVYVQAKRWQNTVGRPELQAFYGALAGQKAKRGVFITTSGFTSQARDFAQSVEGMVLVDGERLVHLMIENEVGVSSRLLKVPKLDMDYFE

SEQ ID NO: 175 - protein, 642 aa, Saccharomyces cerevisiae
MSKAVGIDLGTTYSCVAHFANDRVDIIANDQGNRTTPSFVAFTDTERLIGDAAKNQAAMNPSNTVFDAKRLIGRNFNDPEVQADMKHFPFKLIDVDGKPQIQVEFKGETKNFTPEQISSMVLGKMKETAESYLGAKVNDAVVTVPAYFNDSQRQATKDAGTIAGLNVLRIINEPTAAAIAYGLDKKGKEEHVLIFDLGGGTFDVSLLFIEDGIFEVKATAGDTHLGGEDFDNRLVNHFIQEFKRKNKKDLSTNQRALRRLRTACERAKRTLSSSAQTSVEIDSLFEGIDFYTSITRARFEELCADLFRSTLDPVEKVLRDAKLDKSQVDEIVLVGGSTRIPKVQKLVTDYFNGKEPNRSINPDEAVAYGAAVQAAILTGDESSKTQDLLLLDVAPLSLGIETAGGVMTKLIPRNSTISTKKFEIFSTYADNQPGVLIQVFEGERAKTKDNNLLGKFELSGIPPAPRGVPQIEVTFDVDSNGILNVSAVEKGTGKSNKITITNDKGRLSKEDIEKMVAEAEKFKEEDEKESQRIASKNQLESIAYSLKNTISEAGDKLEQADKDTVTKKAEETISWLDSNTTASKEEFDDKLKELQDIANPIMSKLYQAGGAPGGAAGGAPGGFPGGAPPAPEAEGPTVEEVD

SEQ ID NO: 176 - protein, 306 aa, Saccharomyces cerevisiae
MSDEIVWQVINQSFCSHRIKAPNGQNFCRNEYNVTGLCTRQSCPLANSKYATVKCDNGKLYLYMKTPERAHTPAKLWERIKLSKNYTKALQQIDEHLLHWSKFFRHKCKQRFTKLTQVMITERRLALREEERHYVGVAPKVKRREQNRERKALVAAKIEKAIEKELMDRLKSGAYGDKPLNVDEKVWKKIMGQMEEENSQDEEEDWDEEEESDDGEVEYVADDGEGEYVDVDDLEKWLADSDREASSASQSESDSESESDSDSDEENKNSAKRRKKGTSAKTKRPKVEIEYEEEHEVQNAEQEVAQ

SEQ ID NO: 177 - protein, 622 aa, Saccharomyces cerevisiae
MVRRWIPSGRHLRNNDNTGDDDDSEFTNSMDSGMSIPSLRDSMTTRSSHNDPIKPALMNDSNKVKNLEKELTNAKIKIQVLYEYIRRIPNKDGNAPSLGNDTDFRNSIIEGLNLEINKLKQDLKAKEVEYQDTLQFVQENLENSESIVNTINHLLSFILTHFNEQDENAHLLDKEERETLEETLELSSDYVLEKMDTLSKFIIQFLQDFLHSKSRAESKQDKEEFLSLAQSSPAGSQLESRDSPSSKEENTDGGYQNDEIHDSNNHIDTENVMANSTSLPISAVESRFEKTLDTQLEIVIEILHKEYDQFINSIRLKFEKSQKLEKIIASKLNEQSHLLDSLELEENSSSVIEKQDHLISQLKEKIESQSVLINNLEKLKEDIIKMKQNEKVLTKELETQTKINKLKENNWDSYINDLEKQINDLQIDKSEEFHVIQNQLDKLDLENYQLKNQLNTLDNQKLILSQYESNFIKFNQNLLLHLDSIFNILQKILQESSIAQFDRKMKSIKSVPNALKNLNLIQPKLESLYTFIETALESIINSYISSLISMETPEQPHQQGNELTATPNKELTLRIEELQRRWISERERRKLDANASEARIKALEQENESLRSKLFNLSINNP

SEQ ID NO: 178 - protein, 234 aa, Saccharomyces cerevisiae
MQTPSENTDVKMDTLDEPSAHLIEENVALPEDTFSSHLSYVLYEIAHCKPIMFMIIIIVSLISLIVLFHDNDGCTVILVMSLIVASMALMVVAAFTFGKAITEQEFMIKLLVEVIARKPAGKEWGTVAYNMNQYLFMKRLWYTPYYFYSGKKCHEFFTTLIKEVNSGSHSDSSSNSAEDTQSPVSAGKTSNGLNNFYSIRSDPILMAYVLKATQIEKEAQSEYWRKQYPDADLP

SEQ ID NO: 179 - protein, 161 aa, Saccharomyces cerevisiae
ATSTVVVSCSETTDASGNIYTITTTVPCSSTTATITSCDENGCHVPAPTATDATATVSSKSYTTVTVTHCDNNGCNTKTVTSECSKETAATTISPKSYTTVTVTHCDDNGCNTKTVTSEASKQTSLATSTVTKSAAPTSHTAASSTFTGIVVQSEGMAAGL

SEQ ID NO: 180 - protein, 144 aa, Saccharomyces cerevisiae [sequence omitted]

SEQ ID NO: 181 - protein, 104 aa, Saccharomyces cerevisiae
MLFKPKTRAIPSPTARTLPVSFKLASSDTPLILSSKMEETSVGCALVEANLLVEAKAAAAGLAALVELIRVLDRERIAAVRANIIICACFFYLFCYCSCDSYES

SEQ ID NO: 182 - protein, 111 aa, Saccharomyces cerevisiae
MSLRPCLTPSSMQYSDIYIYPNTTLTLPYFNPSNLSLNLPSHYPTSPLVTLSHSTIPLPTTIHPSTYYHQSTVHHNRYPPISHIQLHYHLPCHYSTIHHLLLTILLFYPPY

SEQ ID NO: 183 - protein, 433 aa, Saccharomyces cerevisiae
MIVGLTLYFVLFRSIQYLLVFLTPIRQFDTSTSLLLNELCSSPSEINSYWNKYFWNKLLSWDSVFFIKNITSKNGKPQFEHEYAFSQLWTFFVRLFIKSNNDSIYHALRVGVAIENVLFYLSGIVLYFLTKKIFSQNIRQSQFARTIAKKTSLLFFLTSAAGFLTSIYSEPLSFFFAFVGIWSRECTISVPVLGQFDISWRYWFPYSFISMACFTLASLNRSNCVLLGIYFIFDLIELTKNRKFVKAICFPLLSGSLMFSALLYQQYYLPYKTFCPQRGEWCKSQLFSSIFITKTSLYSYIQSHYWGVGLLKYWTPNNIPNFLFAVPNIIILIYSSIYFSKIYPSYNLKALVWITRALVVIVCFFAHVQILNRIASFLPLHLWYLADRLVKTSDPKKMENPKGDDKIVKFYIYWLAFWIPLQTILFAAFLPPA

SEQ ID NO: 184 - protein, 290 aa, Saccharomyces cerevisiae
MEKLLQWSIANSQGDKEAMARAGQPDPKLLQQLFGGGGPDDPTLMKESMAVIMNPEVDLETKLVAFDNFEMLIENLDNANNIENLKLWEPLLDVLVQTKDEELRAAALSIIGTAVQNNLDSQNNFMKYDNGLRSLIEIASDKTKPLDVRTKAFYALSNLIRNHKDISEKFFKLNGLDCIAPVLSDNTAKPKLKMRAIALLTAYLSSVKIDENIISVLRKDGVIESTIECLSDESNLNIIDRVLSFLSHLISSGIKFNEQELHKLNEGYKHIEPLKDRLNEDDYLAVKYVL

SEQ ID NO: 185 - protein, 344 aa, Saccharomyces cerevisiae
MHCPICHHRAHVVYCAHCINTSPSLLLKLKLDLILLKDENKELNGKVEQILNEAMNYDQLDIKRMEKKKDPLMNSLMKLDVLRMKKNNNLIRHRIEQLNERIYSKRNHISELKVEIDNYKCYKVGTGTDKLREQVEISDAKNKLAQVSKICESARDYKLNLLNNWFVIQKLQDNFQIPFAIAFQPLISLKNFRILPLAITNDSINIMWKYISFFSDILMIKLPYTNKICEQPMFEFSDSIQTVVQRLIKLIINILQICRHLKLVPSTPMDIPWLLDQYDVDGLFYNMVKRNKMKCRSVSLYWTFGMLYSMVLDNMNNPQRGHPARRTAPPPTVTGPHDRWYVVG

SEQ ID NO: 186 - protein, 312 aa, Saccharomyces cerevisiae
MNIMKRQLCTSSKRFFSTAKNVVKYNTIQDIRNKYFTGTPLSMCTAYDFITATWVNKANCDLLLVGDSLAMTSLGYDSTITLSLNEFKYHVASVCRAEGSSMVVVDMPFGTFESGISDGLKNAIDIMKLDSKVTSVKVEVGSYTKDKYAMKFIEELCSRGIPVMAHIGLTPQKVHSLGGYKVQGSKSLLQMQELYETAMQLQKIGCWSILIECVPHKMAQFITSKLSVPTIGIGAGNGTSGQVLVISDLLGMQGDSVPKFVKQAVNMTDIATQGLKEYIASVEDRTFPERGTHTFKVKEDLWNEFLSSINEK

SEQ ID NO: 187 - protein, 375 aa, Saccharomyces cerevisiae
MNMAERAEATKSWSCEPLSGKTLEEIVQNAENAADLVAYIRKPEVDLDFRLKFIAEHEEFFNEQLSDRNSRIRTCHNLSDKGIRGDTVFVFVPGLAGNLEQFEPLLELVDSDQKAFLTLDLPGFGHSSEWSDYPMLKVVELIFVLVCDVLRKWSTAVPNNDNVNPFNGHKIVLVGHSMGCFLACHLYEQHMADTKAVQTLVLLTPPKAHIEQLSKDKHIIQWALYGVFKLPWLFDVYRNKFDQVKGLQSSGIKQYFYQQGDDVKLKYRKFWQFKNNISNKSRTIIGYLLGWETVDWVKFNGVLTQTDMKQKIIIFGAEKDPIAPIENLEFYKQTINKECLRKVIILPDCSHNLCFDRPELVCENFQREVIDNSKL

SEQ ID NO: 188 - protein, 448 aa, Saccharomyces cerevisiae
MLRLFSLALITCLIYYSKNQGPSALVAAVGFGIAGYLATDMLIPRVGKSFIKIGLFGKDLSKPGRPVLPETIGAIPAAVYLFVMFIYIPFIFYKYMVITTSGGGHRDVSVVEDNGMNSNIFPHDKLSEYLSAILCLESTVLLGIADDLFDLRWRHKFFLPAIAAIPLLMVYYVDFGVTHVLIPGFMERWLKKTSVDLGLWYYVYMASMAIFCPNSINILAGVNGLEVGQCIVLAILALLNDLLYFSMGPLATRDSHRFSAVLIIPFLGVSLALWKWNRWPATVFVGDTYCYFAGMVFAVVGILGHFSKTMLLLFIPQIVNFIYSCPQLFKLVPCPRHRLPKFNEKDGLMYPSRANLKEEPPKSIFKPILKLLYCLHLIDLEFDENNEIISTSNMTLINLTLVWFGPMREDKLCNTILKLQFCIGILALLGRHAIGAIIFGHDNLWTVR

SEQ ID NO: 189 - protein, 687 aa, Saccharomyces cerevisiae
MKPPLNMSRSNKPLTQEANSSAHIDRAHQLAQDFNSKQDDTALTSLPHKNPDIFRFENNITAHSSRRGSLYRDSDATVVLPLSEHTPRLSMDDPYRQLLQQAEISQLRSKKKRHSSRVLRTSFISFVVLVSSLSGLDQGLISGNVMTLSFQKYFHYPLTSPLGNIVSIVNLGAFMASLFVYSGILEPCSRKKMLQISTMIYSLGAIVQVLALNQWCLLLGRFLLGVGMGFAFSMVIIYQFEFPLPCIRKRTLISIQCVSSVIAYSFGIWINCAFRYLGFAWRYPLSTHVALGIILNLMSFYLILESPSWLLKQKNDVEALVLISNVFDDGNFEENQTQLKFRVLKRDILLKSHLQKNSYPYAYILKDFSSIIKLLIGFQLLTRTNGVDAFLYYSPLILQQMGRGERKSIYLTGLNALIYSIVILAYVPLVLRKRKEKTNVLLGSIVMCALLFTISFTDWFPKSTTRYISILFAVFLFTHFISWDSIGWVMTIELLPHLSQAPVILLVSNFYWIFKWFVSLITPILIDRLSWKFYLIPSLSSFISIIFVLKIFPIETRDERLDSDDDSTGNGSGNHDDVFDDTGSEFSSSPSFSAYQINTLGSSIKQNNQAYSSIQNEQILPKNGNLSNQTHGSAQNVYFITSDSGPSRTGEFFSFHNRTDPNISDNIAANKPSSGGGQNSPGDMAVA

SEQ ID NO: 190 - protein, 210 aa, Saccharomyces cerevisiae
MFSYSDFCSIGTAMILSATTFLMGVFFSNMPYDYHLLFNPNSTQEHFDLALRHYQILHETPLPVIVTLCVVAGIGLVGGTIKVFKPNPELQMFEYCSLGLYVLAICVFLTNVKTGIDCSVSHNWGEVTENQGLAVIASSNIILLVMFAGVIILQIGLWYSNWDLQKRLKEFYAQEEREAANAGKKTEKVDNAKKNDNKSKGAQKRKNAKK

SEQ ID NO: 191 - protein, 117 aa, Saccharomyces cerevisiae
MNLEESQSNRGTLNIKKILVIVCMTNKICKHLIQSLLLSKRRLVSVLFDNYQGDMKLRSSPSAIPLVPSTKILQAMEARNDIVDSLIINSHATESDRRTLGDHEVRQCEDTNFGFKI

SEQ ID NO: 192 - protein, 383 aa, Saccharomyces cerevisiae
MKENEVKDEKSVDVLSFKQLESQKIVLPQDLFRSSFTWFCYEIYKSLAFRIWMLLWLPLSVWWKLSNNCIYPLIVSLLVLFLGPIFVLVICGLSRKRSLSKQLIQFCKEITENTPSSDPHDWEVVVANLNSYLYENKAWNTKNFFFNATDCEKMFRTTVLEPFSLKKDKAAKVKSFKDSVPYIEEALQVYATGFDKQWKLFITEKSWSPVGLEDVQLPKDIHRSKLTWFLKRIFTIYSLPLWLAFLNCICVSQHFCLAFRILCPGLFFLMMVWLFQNMRTTALLVKMEHKMQFLLTIINEQESGANGWDEIARKMNRYLFEKKAWKNEEFFFDGIDCEWFFSHFFYRLLSAKKSMWLLPLNVELWPYIKEAQLSRNEESLMKK

SEQ ID NO: 193 - protein, 302 aa, Saccharomyces cerevisiae
MTVIKTEPTTEVTLYSPPSKESLSKDDAHRKKQNNKPPSSINSRSGPNKHKLAAKAPEKKINNTDKQDLSAFLLNPSLIVKPSESKKKENIVAYNDTPGIKTEHTAFQPLTPISKKRALKEKAASEKCDSFDLSRDEKPYIQKKSKTLSSVTEINSSEYKLSLNGENTSSPAKEKSQEPIENPGSYQKTRNYLFEKPDPLDTCLQDYSSMLPSNVAEEDQEYFISVADSTLEEWTNKGQEIIDQQFQLYQEIIKKRIELSYKFKGIISVINDRADALEEQGQQLEGKIKKVKTLANEILNII

SEQ ID NO: 194 - protein, 108 aa, Saccharomyces cerevisiae
MIYMLVFLDRQQLVHIFLFRSRGTTNIIKACYFFFLLFCKLLNAAEAPLLAISLSKFVWLLLRVCKTSYLLLLITMLEGAEYFSLVVGNSICGSGGEGVGCRYPVVLI

SEQ ID NO: 195 - protein, 224 aa, Saccharomyces cerevisiae
MWDSLIVSINDTHKLGLEDCLAVFGHVPITKAVKHVRLTEIDTQTSTFTLKFLHTETGQNIEKIIYFIDNDTGNDTRTATGIKQIFNKMFRIAAEKRKLSLIQIDTVEYPCTLVDLLILVGVALPPLCYLYRPALHAIFFLVPNPVGSTLEAWLDSDLVLRLIIVAEFLTHALETLIFVVPRLKYYRVPGEFVPEWLLLGLLEGYGPARRLDTKARTLGEGSVN

SEQ ID NO: 196 - protein, 482 aa, Saccharomyces cerevisiae
MDFYTTDINKNVVPLFSKGTVARTASKAQYPSWCNNALKLTNILLKSLRCKFQTNRCEDDRGFEVYCVILKSIALLMAAKESLILLQIPPSLPSGFPFRSPQLSFTYLSTRLSGSQHKSTHSHHINHQTHPIHSSSSNSNSNNRIPTKTDSSKQHTQHFSFANAGASNRDELLSIVRKIDKSNLKCCDCGSTATVEWVSINLLCILCIKCSGVHRSLGSHISKIRSLTLDNFTSLELMHLLQNNVSNSNVNAIYESNLRNFPVKKITANSDDSERSKFIIDKYQFKKFVIDSNQGREASLKSLIKAIHLDSVFMMQRAIAQSKYSLRELTASEKEQNDLNHSSIFQYSLKHYEIVDGTPIFFITEFLLCNGIHIDNLPKITTNWSPKVLEYWETKLEMYGTFQAVNTSRPRSGPHLNMHSNVDSASSYNKKHDLRVNIPERSASASKRWSLSSIPKSSQNLMSPTNLLTMHKSLKLAKKDKK

SEQ ID NO: 197 - protein, 156 aa, Saccharomyces cerevisiae
HSATIVMDLLGDIVEKDTSDSVESNDNGTLSTNNCGTGFPELYKPKKISSWKERLREKRAQKKKTSGKDAEKQQTSTDAPLSEAKSIHNENIKVLQGMSDEQIVQEREDLYNSLDPKLIAKLLKNINKRAKDENNTPLFAEIEGASGTWVGGNKQG

SEQ ID NO: 198 - protein, 87 aa, Saccharomyces cerevisiae
YRPKPCPKAAFCSWKRCPTRSLCFKNFSEHFMMHVCSLLVSFDVVKSLTQSVKHLSTRLEYKRMKSFICFCSTTFWNSCCSLEFNAS

SEQ ID NO: 199 - protein, 102 aa, Saccharomyces cerevisiae
MSLSFLLFSPFLPPCFSSISICLSVLSTVSFFFAFTIPHYVLRCGSVDEWHIHSSAEDFRTQRCVCAVKLSASLLGCLLACASWSLLLEVSRIKWHVGTAYS

SEQ ID NO: 200 - protein, 928 aa, Saccharomyces cerevisiae
MKDSVDCPSILPTDRTSVLSETSTLVGSSSHVYSRHAPMNSYHNSMNSNIYHSPKASSPLVSYKTSSPVLLKRATAPVLPSFKPKEQRYNKPQGCSLITAVELGKIIETLPDEKVLLLDVRPFTEHAKSIITNSIHVCLPSTLLRRKNFTFSKLLDNLTPSEQSVLKSKLAIDNLRIIIYDSTANQTESSVSLPCYGIASKLIEFDTNVKKTVSILMCGFPQFKILFPDHINTNTFNSDCISSAEPKSPKTNLMNSLHNTAPHMTATTPLSSPQMNLKLKVPDDSRSDHSNFSSSPSPRNVLSDSPMSSSSPISALFKFQLPAPQTNINQMFKFSQNEEIMGLETYLSAVNIKEEHERWYNNDSAKKSLQNFQFPKNQNSLEKDTNKDKLGFQIRYENLSKNYEKEVIDSVIPEWFQHLMSIPKIELVSQFQKLDFLEKRRLNHSVSFRKKENSFILEKPSSYPEQLTSTSSSTIMPPKFPDVNKVQKRSHSQPIFTQYSKYKSMLSLESDSDSESDDVIISSGVELGAKNRYKDIFPYEHSRVILKKGLQSSKGIKHSHSTSDGGILDNYINANYLSLPRFSVEQNSSFQTTTTTTRRVRYIATQAPMPSTVHDFYTCILNNGVPLVLSLTNDFENGIEKCYRYWQEGNYNGIHVKLLEKKILKMPSTTSMRKNTMGTQNSSLYSAGVQGNSSNYSTDNDNDNDNNNNNNNNSNIPVTAAACDDDDDDDDDAILIRQILLTYHDQEKPYELLQIQVKNWPDLGTLLNPISILQAINVKNHIIDTLFARNYYQNDQLPTILVHCSAGCGRTGTLCTIDSILSNFEMFEMLQKEFVKLKYPAKLFDPISWTINIFRKERISMVQNINQFIFIYDCLLFYFRLRLDDITERTDGDGSNKDNISLSALIEQIEKLEILQTFVDDKLKELPQ

SEQ ID NO: 201 - protein, 173 aa, Saccharomyces cerevisiae
MNFKEPLVNFLKCVLNNINSAFSHRIDQLQLQLLRETNILRVLNRGIERLFSENPRTHSVSRIVVEKDVGCRIGRYVEGSKYELVESRAKEIQIYYERMVFEITQELKGDKRVFALIANLSQRYSAERKEIRNVKVHGGRPCNENEFQVIPIRFKPINLERRARLIRKKKTIN

SEQ ID NO: 202 - protein, 240 aa, Saccharomyces cerevisiae
MADEERLKEFKEANKIVFDPNTRQVWENQNRDGTKPATTFQSEEDIKRAAPESEKDTSATSGIVPTLQNIVATVTLGCRLDLKTVALHARNAEYNPKRFAAVIMRIREPKTTALIFASGKMVVTGAKSEDDSKLASRKYARIIQKIGFAAKFTDFKIQNIVGSCDVKFPIRLEGLAFSHGTFSSYEPELFPGLIYRMVKPKIVLLIFVSGKIVLTGAKQREEIYQAFEAIYPVLSEFRKM

SEQ ID NO: 203 - protein, 142 aa, Saccharomyces cerevisiae
MADQVPVTTQLPPIKPEHEVPLDAGGSPVGNMGTNSNNNNELGDVFDRIKTHFPPAKVKKIMQTDEDIGKVSQATPVIAGRSLEFFIALLVKKSGEMARGQGTKRITAEILKKTILNDEKFDFLREGLCVEEGQTQPEEESA

SEQ ID NO: 204 - protein, 303 aa, Saccharomyces cerevisiae
MSTTDSGFVLYHYTPSKAAAIVFVVLFIIMTVIFAVQTLYAARKSSKALKNNPFESSDDKVDSLEDAEYKQLKITPTVFAFIPFFTGCIMEAVGYIGRALSSSNPERTTPYIIQSVLLLVAPALIAATIYMIFGRLLHVMRCQSLILISARFGTTFFVVGDVFSFFLQAAGGGLMSKAGSTKTGSGLITAGLFVQVIFFGFFIINEIRFTVNVKRRCLFYEDISRKWIFVNATLLLSSMLILLRSIVRIVEFIQGFNGYIISHEYFIYVFDAVPMLLVIIAFSVGSFFGNVFDVIKECQTLSN

SEQ ID NO: 205 - protein, 368 aa, Saccharomyces cerevisiae
MKLDSIDITHCQLVKSTRTARIYRSDTYAIKCLALDFDIPPHNAKFEVSILNKLGNKCKHILPLLESKATDNNDLLLLFPFEEMNLYEFMQMHYKRDRRKKNPYYDLLNPSIPIVADPPVQKYTNQLDVNRYSLSFFRQMVEGIAFLHENKIIHRDIKPQNIMLTNNTSTVSPKLYIIDFGISYDMANNSQTSAEPMDSKVTDISTGIYKAPEVLFGVKCYDGGVDVWSLLIIISQWFQRETSRMGHVPAMIDDGSDDMNSDGSDFRLICSIFEKLGIPSIQKWEEVAQHGSVDAFVGMFGADGDGKYVLDQEKDVQISIVERNMPRLDEIADVKVKQKFINCILGMVSFSPNERWSCQRILQELEKP

SEQ ID NO: 206 - protein, 206 aa, Saccharomyces cerevisiae
MNSEYDYLFKLLLIGNSGVGKSCLLLRFSDDTYTNDYISTIGVDFKIKTVELDGKTVKLQIWDTAGQERFRTITSSYYRGSHGIIIVYDVTDQESFNGVKMWLQEIDRYATSTVLKLLVGNKCDLKDKRVVEYDVAKEFADANKMPFLETSALDSTNVEDAFLTMARQIKESMSQQNLNETTQKKEDKGNVNLKGQSLTNTGGGCC

SEQ ID NO: 207 - protein, 542 aa, Saccharomyces cerevisiae
MISPISFLSSLLCLTYLTSALPILPKREVVTRVHTASTTNVVTDFYSTTTEVVIAPTVEFLISDSVTFTTTLIPQGVNPTAEPTTTITKVLLKKAEMSTSSQPTSTLQPSTIPQSTSSFQAESTLQAVSTQQTAMSVSAGTSEDVQQLATTSTSISSSPSPTTTSTSTQNIVSGVGEANVEGNTQSQHHSYQAAATSTLNQQTSTSIASQESTESTNTPTSSSTSSSTSSSTSSSTSSSTSSSTSSSTSSSTSSSTSSTQETAATTSEGSSSSSAAITSSPKAIAYSPYNDDGSCKSADAVSSDLTLIKSKGISKIRVYGTDCNSFETVQPAAVKLGIKINQGLYITSSGVDSIDDSVTTLIQYGQTNGWDVFDFITVGNEAINNGWCSVSDLISKISSVKSKLSEAGYSGQITTSEPPVSFENNPDLCKKSDIDFVGINPHAYFDTSASAETAGTFVKGQVELIQGVCGTSNVFVTETGYPSSGIQNGGNIPSTANQITAVQNILNEMDLDVTILSTYNDYWKAPGDYGIEQSFGVIEYFP

SEQ ID NO: 208 - protein, 579 aa, Saccharomyces cerevisiae
MNRDNMDTTKRKEDHTKHTTDVIEFYEEGTAASSLNIATEKANSSPSILRRIINRAAWLSKKVDAMGVESTGIQRISPYERGTSKKQFLHVAGLWLSATGGLSSMSSFLLGPLLFGLSFRESVASSLISVTIGCLIAAYCSIMGPQSGCRQMVTARYLFGWWFVKLVALASIIGVMGWSVVNSVVGGEMLAAISNDKVPLWVGIVIVTVCSFLVAIFGIKQVIKVETYLSVPVLTAFLLLYISSSDKYSFVNAYVSKGNLDSSTRKGNWMSFFSLCYSITATWGSITADYYILFPEDTPYIQIFCLTFFGTFLPTCFVGILGLLLASVAMSYKPWSVEYDSHGMGGLLWAGFQRWNGFGKFCVVVLVFSLVSNNIINTYSAAFSIQLSSVFCAKIPRWFWSIVCTIICLVCALIGRNHFSTILGNFLPMIGYWISMYFILLFEENLVFRRFFLHLYTKEFPTVTGEINGPELVGSSKEVEKDAVTNIHLLKRKHKVTKHRYNWDKWEDYEVLTHGYAATFAFIVGVAGVVVGMAQAYWIGPIAAKFGEYGGDVAMWLSMAFSGVVYPPCRYLELRKFGR

SEQ ID NO: 209 - protein, 165 aa, Saccharomyces cerevisiae
MEEVKAVNSAAKVLCSVDPQFDPSKLTLSVGATPTSNSLKLDNKSTLVKFITTQLVSTLEIHCGNYCMYDLQQVATGCVQDHELSGFVLGTVLSSYPSRGELLSNTGVMCLTREASSIKGFGICADLEHVLKSESFSREWYVARVSQEHGILRPIRNWNETTPLN

SEQ ID NO: 210 - protein, 113 aa, Saccharomyces cerevisiae
MSILSSTQSTILRIPSGLITFLLSKLFLLLRVEPSSASMSISESELLLMGNINDESPKPGKLASAPLASLTNLVFSIDVKGLTLIATTMEDCLVSGTFMLVSIVYSWKENSSS

SEQ ID NO: 211 - protein, 219 aa, Saccharomyces cerevisiae
MDLDLASILKGEISKKKKELANSKGVQPPCTEKFQPHESANIDETPRQVEQESTDEENLSDNQSDDIRTTISKLENRPERIQEAIAQDKTISVIIDPSQIGSTEGKPLLSMKCNLYIHEILSRWKASLEAYHPELFLDTKKALFPLLLQLRRNQLAPDLLISLATVLYHLQQPKEINLAVQSYMKLSIGNVAWPIGVTSVAFMLVVHIRKFKEAGMLLT

SEQ ID NO: 212 - protein, 1155 aa, Saccharomyces cerevisiae
MNSNELDLRNKYFYEIFGKKRKSDTSTPTQLFSGSKVQTNINEISITNDEDEDSTEDENKASLKDYTLGHDTGARYRIAPDCSSHQLKASPVLHISTNLNSSPQSFTGDQISPTNKKISINDSTRQDKGNSCTTTSSPSQKRSNVLLPHVRKHSSPSLLSFSKNSGSHMGDPNQLSTPPTPKSAGHTMELHSSFNGKHSSSSTSSLFALESLKTQNRRSSNSSNHSSQYRRHTNQHQRHHSRSKSSPVSLTEISMIKGTPLVYPALLSLIAIKFKQTIKLSTHKKMGLLYRDSFTGKQAIDTLCLIIGSLDRNLGMLIGKSLEAQKLFHDVLYDHGVRDSVLEIYELSSESIFMAHQSQSSTSIANTFSSSSSSVNSLRTKTEIYGVFVPLTHCYSSTCSLEKLCYSISCPNRLQQQANLHLKLGGGLKRNISLALDKEDDERISWTNSVPKSVWESLSKQQIKRQEAIYELFTTEKKFVKSLEIIRDTFMKKLLETNIIPSDVRINFVKHVFAHINEIYSVNREFLKALAQRQSLSPICPGIADIFLQYLPFFDPFLSYIASRPYAKYLIETQRSVNPNFARFDDEVSNSSLRHGIDSFLSQGVSRPGRYSLLVREIIHFSDPVTDKDDLQMLMKVQDLLKDLMKRIDRASGAAQDRYDVKVLKQKILFKNEYVNLGLNNEKRKIKHEGLLSRKDVNKTDASFSGDIQFYLLDNMLLFLKSKAVNKWHQHTVFQRPIPLPLLFICPAEDMPPIKRYVTENPNCSAGVLLPQYQTSNPKNAIVFAYYGTKQQYQVTLYAPQPAGLQTLIEKVKQEQKRLLDETKHITFKQMVGQFFHSYINTNRVNDVLICHAGKILLVATNMGLFVLNYATSINQKPVHLLHKISISQISVLEEYKVMILLIDKKLYGCPLDVIDDAENADFLFRKNSKVLFKYVAMFKDGFCNGKRIIMIAHHFLHAAQLLIVNPLIFDFNSGNFKKNLKAGLVDFSVDSEPLSFSFLENKICIGCKKNIKILNVPEVCDKNGFKMRELLNLHDNKVLANMYKETFKVVSMFPIKNSTFACFPELCFFLNKQGKREETKGCFHWEGEPEQFACSYPYIVAINSNFIEIRHIENGELVRCVLGNKIRMLKSYAKKILYCYEDPQGFEIIELLNF

SEQ ID NO: 213 - protein, 400 aa, Saccharomyces cerevisiae
MTASSNDDDLIFECYSDPELKRWTHLANAKAWKGILTVQQYADREQLLGSSEISQKNKSNEMMTKYPKSYQWLGQKYFVLKDRSLPDNGKFSQVVSSCETLNRIGYCIHPGSNGKIEPALIVCIGGVFTFENHRGKGYAKKMIIKLNEFYDKIRDDANTVLELKNLVINLYSEVGEYYSALGYESMHVPLHRISKLDELTERYCGEDDDHDGKYLGFDDYRGLVGLHETQFKESLLSLHKENPEKFVFTVAPDFDIFTWFQYRDLFIMNKSGRKAQQNLFFGYALSDNSHIIWHHNWNGDSLIIVKIHIPEETFQRKELKLKKLLRKAIEETKLHGLQELEFWDEEIPIKKYPQLFQLLTELENESKVFSENGSISAVRPPKGYTAEQVIWDNNTKFCWF

SEQ ID NO: 214 - protein, 117 aa, Saccharomyces cerevisiae
MSRQSAFKFQNGNRHERACLSDVHKILIIILYSTKGKRELGKRITHFMYIHIFCTYLYQASIVQYCSSTLLNVIAFSWYPLNLIYKYEYILRSKLILMVCLDFARSGGVLDSGDVSL

SEQ ID NO: 215 - protein, 93 aa, Saccharomyces cerevisiae
MSFLGFGGGQPQLSSQQKIQAAEAELDLVTDMFNKLVNNCYKKCINTSYSEGELNKNESSCLDRCVAKYFETNVQVGENMQKMGQSFNAAGKF

SEQ ID NO: 216 - protein, 431 aa, Saccharomyces cerevisiae
MADFKSLGLSKWLTESLRAMKITQPTAIQKACIPKILEGRDCIGGAKTGSGKTIAFAGPMLTKWSEDPSGMFGVVLTPTRELAMQIAEQFTALGSSMNIRVSVIVGGESIVQQALDLQRKPHFIIATPGRLAHHIMSSGDDTVGGLMRAKYLVLDEADILLTSTFADHLATCISALPPKDKRQTLLFTATITDQVKSLQNAPVQKGKPPLFAYQVESVDNVAIPSTLKIEYILVPEHVKEAYLYQLLTCEEYENKTAIIFVNRTMTAEILRRTLKQLEVRVASLHSQMPQQERTNSLHRFRANAARILIATDVASRGLDIPTVELVVNYDIPSDPDVFIHRSGRTARAGRIGDAISFVTQRDVSRIQAIEDRINKKMTETNKVHDTAVIRKALTKVTKAKRESLMAMQKENFGERKRQQKKKQNDGKSLRS

SEQ ID NO: 217 - protein, 261 aa, Saccharomyces cerevisiae
MARGPKKHLKRLAAPHHWLLDKLSGCYAPRPSAGPHKLRESLPLIVFLRNRLKYALNGREVKAILMQRHVKVDGKVRTDTTYPAGFMDVITLDATNENFRLVYDVKGRFAVHRITDEEASYKLGKVKKVQLGKKGVPYVVTHDGRTIRYPDPNIKVNDTVKIDLASGKITDFIKFDAGKLVYVTGGRNLGRIGTIVHKERHDGGFDLVHIKDSLDNTFVTRLNNVFVIGEQGKPYISLPKGKGIKLSIAEERDRRRAQQGL

SEQ ID NO: 218 - protein, 130 aa, Saccharomyces cerevisiae
MCLGKLYFEQLILVRCIKGRQSGNITTGESRCVSWNVYCTTSMIGLFSWRKMLLFQHFSYTQRENRQIGGKTWSLISSLFHLNETLASALHHPYETLALYEAYFACGKKNFFCKRGYSETVTEGRGWKRV

SEQ ID NO: 219 - protein, 640 aa, Saccharomyces cerevisiae
MRRERQRMMSFEDKDKDDLDNSNSNNSSEMTDTAMMPPLKRLLITGSSDDLAQGSSGKKKMTMATRSPSSSPDLATNDSGTRVQPLPEYNFTKFCYRHNPDIQFSPTHTACYKQDLKRTQEINANIAKLPLQEQSDIHHIISKYSNSNDKIRKLILDGILSTSCFPQLSYISSLVTHMIKIDFISILPQELSLKILSYLDCQSLCNATRVCRKWQKLADDDRVWYHMCEQHIDRKCPNCGWGLPLLHMKRARIQQNSTGSSSNADIQTQTTRPWKVIYRERFKVESNWRKGHCRIQEFKGHMDGVLTLQFNYRLLFTGSYDSTIGIWDLFTGKLIRRLSGHSDGVKTLYFDDRKLITGSLDKTIRVWNYITGECISTYRGHSDSVLSVDSYQKVIVSGSADKTVKVWHVESRTCYTLRGHTEWVNCVKLHPKSFSCFSCSDDTTIRMWDIRTNSCLKVFRGHVGQVQKIIPLTIKDVENLATDNTSDGSSPQDDPTMTDGADESDTPSNEQETVLDENIPYPTHLLSCGLDNTIKLWDVKTGKCIRTQFGHVEGVWDIAADNFRIISGSHDGSIKVWDLQSGKCMHTFNGRRLQRETQHTQTQSLGDKVAPIACVCIGDSECFSGDEFGCVKMYKFDLND

SEQ ID NO: 220 - protein, 121 aa, Saccharomyces cerevisiae
MNFSTVFQAIIAVLGLTTVTALAEFDFDVGYEEFVRTNPDTIFLESDIGLHVGYTEGGERQIATIPHNSTLGTSLREYSGCGGNGTETSIATPAPTMSEVPIATFVKRRKSVPILLPQVCM

SEQ ID NO: 221 - protein, 336 aa, Saccharomyces cerevisiae
MARKLKGKIGSKGLKGALLRHKAKVKLVRNIESKQKHELRKKNSSANNKTVKRNQEFQKLNQGKVMPFEKDETLMLCGEGDFSFARSIVEQNYIESDNLIITSYDNSVNELKLKYPHTFEENYQYLKDLNIPIFFQIDVTKLVKSFKISKNNTWFKIINRLSDHRWGNKPLQNIVFNFPHNGKGIKDQERNIREHQDLIFNFFQNSLQLFNLINTKIQNDTLRYTQGYDLNEDTPQAKKLTAEGYGNIILSLFDGEPYDSWQIKLLAKKNGLTLSRSSKFQWENFPGYHHRRTNSEQDTTKPAKERDARFYIFSKYVSNSSKHNRKSKKDTDSDSD

SEQ ID NO: 222 - protein, 117 aa, Saccharomyces cerevisiae
MYIYVEVCTHVHAQATDATRPGIHICTYIYAHIYIYIYVYVNVYIQLVISRAEWAEKHSIVEKKREEKGRGAIAMDVVEYREGQAVVQWMRFEAQRKGGASKHRTLSAETGIRGEGE

SEQ ID NO: 223 - protein, 1032 aa, Saccharomyces cerevisiae
MTPDELNSAVVTFMANLNIDDSKANETASTVTDSIVHRSIKLLEVVVALKDYFLSENEVERKKALTCLTTILAKTPKDHLSKNECSVIFQFYQSKLDDQALAKEVLEGFAALAPMKYVSINEIAQLLRLLLDNYQQGQHLASTRLWPFKILRKIFDRFFVNGSSTEQVKRINDLFIETFLHVANGEKDPRNLLLSFALNKSITSSLQNVENFKEDLFDVLFCYFPITFKPPKHDPYKISNQDLKTALRSAITATPLFAEDAYSNLLDKLTASSPVVKNDTLLTLLECVRKFGGSSILENWTLLWNALKFEIMQNSEGNENTLLNPYNKDQQSDDVGQYTNYDACLKIINLMALQLYNFDKVSFEKFFTHVLDELKPNFKYEKDLKQTCQILSAIGSGNVEIFNKVISSTFPLFLINTSEVAKLKLLIMNFSFFVDSYIDLFGRTSKESLGTPVPNNKMAEYKDEIIMILSMALTRSSKAEVTIRTLSVIQFTKMIKMKGFLTPEEVSLIIQYFTEEILTDNNKNIYYACLEGLKTISEIYEDLVFEISLKKLLDLLPDCFEEKIRVNDEENIHIETILKIILDFTTSRHILVKESITFLATKLNRVAKISKSREYCFLLISTIYSLFNNNNQNENVLNEEDALALKNAIEPKLFEIITQESAIVSDNYNLTLLSNVLFFTNLKIPQAAHQEELDRYNELFISEGKIRILDTPNVLAISYAKILSALNKNCQFPQKFTVLFGTVQLLKKHAPRMTETEKLGYLELLLVLSNKFVSEKDVIGLFDWKDLSVINLEVMVWLTKGLIMQNSLESSEIAKKFIDLLSNEEIGSLVSKLFEVFVMDISSLKKFKGISWNNNVKILYKQKFFGDIFQTLVSNYKNTVDMTIKCNYLTALSLVLKHTPSQSVGPFINDLFPLLLQALDMPDPEVRVSALETLKDTTDKHHTLITEHVSTIVPLLLSLSLPHKYNSVSVRLIALQLLEMITTVVPLNYCLSYQDDVLSALIPVLSDKKRIIRKQCVDTRQVYYELGQIPFE

SEQ ID NO: 224 - protein, 542 aa, Saccharomyces cerevisiae
MSVQKEEYDIVEKAQLSVSAESLTSDSESISHNPFDDFHKAERWRKVYESSGYEGLSKFDPEFTWTKDEEKKLVRKMDLKIFLWVFIMFAFLDLIRKNIARAVSDNFIVDLKMNTNDYNLGQTVYLVIFLASELPGNLLSKRFGPERVIPVQIVLWSVICITQAGLKNRGQFIATRCLLGMVQGGFIPDNILYLSYYYTGAELTFRLSFFWCAIPLFQILGSLLASGIIEMRGIHNLAGWQYLFIIEGFLSLSVGVASFYLMRRGPTQTGESAFHKGKSLFTEYEEKIMVNRILRDDPSKGDMSNRQPVTFKEILYTLTEFDLWPLFIQGITAFISLQTVGSYLSLILKSLNYSTFLSNILAIPGQALLLINLPLAALLSRKLKEKSLCVGIANVWVLPFIVSLVALPTDTNPWIKYILLTGILGLPYTHSILAGWVSEISNSVRSRTVGTALYNMSAQVGAIIASNMYRNDDKPYYTRGNKILLGFTCFNICMAVATKFYYISRNKYKDRKWNSMTKEEQINYLDTTKDKGMKRLDYRFIH

SEQ ID NO: 225 - protein, 589 aa, Saccharomyces cerevisiae
MTISSAHPETEPKWWKEATIYQIYPASFKDSNNDGWGDMKGIASKLEYIKELGTDAIWISPFYDSPQDDMGYDIANYEKVWPTYGTNEDCFALIEKTHKLGMKFITDLVINHCSSEHEWFKESRSSKTNPKRDWFFWRPPKGYDAEGKPIPPNNWRSYFGGSAWTFDEKTQEFYLRLFCSTQPDLNWENEDCRKAIYESAVGYWLDHGVDGFRIDVGSLYSKVAGLPDAPVIDENSKWQLSDPFTMNGPRIHEFHQEMNKFIRNRVKDGREIMTVGEMRHATDETKRLYTSASRHELSELFNFSHTDVGTSPKFRQNLIPYELKDWKVALAELFRYVNGTDCWSTIYLENHDQPRSITRFGDDSPKNRVISGKLLSVLLVSLSGTLYVYQGQELGEINFKNWPIEKYEDVEVRNNYDAIKEEHGENSKEMKRFLEAIALISRDHARTPMQWSREEPNAGFSGPNAKPWFYLNESFREGINAEDESKDPNSVLNFWKEALRFRKAHKDITVYGYDFEFIDLDNKKLFSFTKKYDNKTLFAALNFSSDSIDFTIPNNSSSFKLEFGNYPRSEVDASSRTLKPWEGRIYISE

SEQ ID NO: 226 - protein, 666 aa, Saccharomyces cerevisiae
MGKTKTRGRRHQDKQRKDEFEPSSNSAKEHIQQEESTYNDEAEIKETQPQMFFGVLDREELEYFKQAESTLQLDAFEAPEEKFQFVTSIIEEAKGKELKLVTSQITSKLMERVILECDETQLKDIFQSFNGVFFGLSCHKYASHVLETLFVRSAALVERELLTPSFDNNEKEGPYVTMENMFLFMLNELKPHLKTMMNHQYASHVLRLLILILSSKTLPNSTKANSTLRSKKSKIARKMIDIKDNDDFNKVYQTPESFKSELRDIITTLYKGFTNGAESRSDISQSTITKFREYSVDKVASPVIQLIIQVEGIFDRDRSFWRLVFNTADEKDPKEESFLEYLLSDPVGSHFLENVIGSARLKYVERLYRLYMKDRIVKLAKRDTTGAFVVRALLEHLKEKDVKQILDAVVPELSMLLNSNMDFGTAIINASNKQGGYLRDDVIAQLIQKYYPEKSDAKNILESCLLLSASTLGNTRDDWPTAEERRRSVFLEQLIDYDDKFLNITIDSMLALPEERLIQMCYHGVFSHVVEHVLQTTRVDIIKRKMLLNILSKESVNLACNVYGSHIMDKLWEFTAKLTLYKERIARALVLETEKVKNSIYGRQVWKNWKLELYVRKMWDWKKLIKEQEFEIFPNSKPLQPKPEKHSRERNNSKEGSAFKKQKHYR

SEQ ID NO: 227 - protein, 365 aa, Saccharomyces cerevisiae
MPNTAPPLPRAPPVPPATFEFDSEPTATHSHTAPSPPPHQNVTASTPSMMSTQQRVPTSVLSGAEKESRTLPPHVPSLTNRPVDSFHESDTTPKVASIRRSTTHDVGEISNNVKIEFNAQERWWINKSAPPAISNLKLNFLMEIDDHFISKRLHQKWVVRDFYFLFENYSQLRFSLTFNSTSPEKTVTTLQERFPSPVETQSARILDEYAQRFNAKVVEKSHSLINSHIGAKNFVSQIVSEFKDEVIQPIGARTFGATILSYKPEEGIEQLMKSLQKIKPGDILVIRKAKFEAHKKIGKNEIINVGMDSAAPYSSVVTDYDFTKNKFRVIENHEGKIIQNSYKLSHMKSGKLKVFRIVARGYVGW

SEQ ID NO: 228 - protein, 219 aa, Saccharomyces cerevisiae
MRFQLFIYFYFTIVVIAGTNTIQQFSDAGDRLITSLRNLDNNGTYETLTAEKVPIIEGQIQNISAKYEQHTFILKGLEAVLNYKVKSLDNNERESLEIEYEKVEKALDAALNVSPFEYIKKFKEVSRGKVVNALENLSREQNRITINGGREDEKEKEAREKKKRLDRIKRILTVSLLELGLAQGVADLCAVAPFACLLGVTVGSIGFIFWLALIYNAIQ

SEQ ID NO: 229 - protein, 133 aa, Saccharomyces cerevisiae
MDRDHINDHDHRMSYSINKDDLLLMVLAVFIPPVAVWKRKGMFNRDTLLNLLLFLLLFFPAIIHACYVVYETSSERSYDLSRRHATAPAVDRDLEAHPAEESQAQPPAYDEDDEAGADVPLMDNKQQLSSGRT

SEQ ID NO: 230 - protein, 108 aa, Saccharomyces cerevisiae
MVASCKDQKKAVAICLQRSPCVMIERHNPQECLDNPELNKDLPELCIAQMKAFLDCKRGIVDMTKRFTGNAPLSTGKYDQQYENLCKGKFDPREEMEKLKLLNSQQKD

SEQ ID NO: 231 - protein, 453 aa, Saccharomyces cerevisiae
MNNTSITGPQVLHRTKMRPLPVLEKYCISPHHGFLDDRLPLTRLSSKKYMKWEEIVADLPSLLQEDNKVRSVIDGLDVLDLDETILGDVRELRRAYSILGFMAHAYIWASGTPRDVLPECIARPLLETAHILGVPPLATYSSLVLWNFKVTDECKKTETGCLDLENITTINTFTGTVDESWFYLVSVRFEKIGSACLNHGLQILRAIRSGDKGDANVIDGLEGLAATIERLSKALMEMELKCEPNVFYFKIRPFLAGWTNMSHMGLPQGVRYGAEGQYRIFSGGSNAQSSLIQTLDILLGVKHTANAAHSSQGDSKINYLDEMKKYMPREHREFLYHLESVCNIREYVSRNASNRALQEAYGRCISMLKIFRDNHIQIVTKYIILPSNSKQHGSNKPNVLSPIEPNTKASGCLGHKVASSKTIGTGGTRLMPFLKQCRDETVATADIKNEDKN

SEQ ID NO: 232 - protein, 361 aa, Saccharomyces cerevisiae
MISANSLLISTLCAFAIATPLSKRDSCTLTGSSLSSLSTVKKCSSIVIKDLTVPAGQTLDLTGLSSGTTVTFEGTTTFQYKEWSGPLISISGSKISVVGASGHTIDGQGAKWWDGLGDSGKVKPKFVKLALTGTSKVTGLNIKNAPHQVFSINKCSDLTISDITIDIRDGDSAGGHNTDGFDVGSSSNVLIQGCTVYNQDDCIAVNSGSTIKFMNNYCYNGHGISVGSVGGRSDNTVNGFWAENNHVINSDNGLRIKTVEGATGTVTNVNFISNKISGIKSYGIVIEGDYLNSKTTGTATGGVPISNLVMKDITGSVNSTAKRVKILVKNATNWQWSGVSITGGSSYSGCSGIPSGSGASC

SEQ ID NO: 233 - protein, 167 aa, Saccharomyces cerevisiae
MQEFYSFSPIDENGNPFPFNSLRNKVVLIVNVASHCAFTPQYKELEYLYEKYKSHGLVIVAFPCGQFGNQEFEKDKEINKFCQDKYGVTFPILHKIRCNGQKQDPVYKFLKNSVSGKSGIKMIKWNFEKFVVDRNGKVVKRFSCMTRPLELCPIIEELLNQPPEEQI

SEQ ID NO: 234 - protein, 516 aa, Saccharomyces cerevisiae
MNSGGEEPTIKPNVFNITQLLNSNGEKPGIACIFLSKFDMKKGNIIIWSKSINGAAIDLSNIEFKSLPAGIHEQTDDVVNFVVPKELDVCQTAKTTTYDYGIAYFKQNSFDIIENDNRIDRSKVQMFSLGVIIDVQNASSDSKKHFYKEIYHAYAANRYSSYLESLLGQWIRQRDLDKFDIFEKFFDENNQGHMAENSVEVFEHSPKERRHLVEYLPYWTRKLGPLIFPLWKASLLQSRILILVPQGESFELCNSLAYCVFLISMLPKNLIGNHVSDEYIKPIFTVSTSDIPFLESFKKGNGYVATTSEEILLYKPEIYDIVVKLTSSSTIEESPEKEVEILTASGEQNKATPLDLEVYEKLILGELQEDASTNATCRHHEVTEPISWLQFLIDGFFLLTTAGYLVAPYHLANNFKIPRHVSGPEPNNSEIQIAENLVRYFHRRTSNLYNDLKDVIQKSENIDSEQPITIAASFLTKLNLDCFSKQDHQFVKDIALKWFQRSIDISNLPECLGNLC

SEQ ID NO: 235 - protein, 450 aa, Saccharomyces cerevisiae
MAKDLLPKQAANEPSLKDCTCKRCLKLGASKEKKIRRKKKGEEKRERHYGNRRKLTFNFLKHTNMENTNYDVITSVGYLNEKYGLKKSHYIEKFIKCIHRKINIDVSKITDAYVNSLNPWVKVKLFLLLVTLSEKGGPEYWLDKTDGEKNSEASSTDNSLENSTKGADSAGSTALRDEMVKSHKNLFPTLTEQIIQHNINQDFTESTYDEDYVFSSIWANFMEGLINHYLEKVIVPYSEMKVCQQLYKPMMKIISLYNEYNELMVKSEKNGFLPSLQDSENVQGDKGEKESKDDAVSQERLERAQKLLWQAREDIPKTISKELTLLSEMYSTLSADEQDYELDEFVCCAEEYIELEYLPALVDVLFANCGTNNFWKIMLVLEPFFYYIEDVGGDDDEDEDNVDNSEGDEESLLSRNVEGDDNVVERHFKPDPRVITLEKICEVAARQKWI

SEQ ID NO: 236 - protein, 412 aa, Saccharomyces cerevisiae
MSQGTLYINRSPRNYASEALISYFKLDVKIVDLEQSSEFASLFPLKQAPAFLGPKGLKLTEALAIQFYLANQVADEKERARLLGSDVIEKSQILRWASLANSDVMSNIARPFLSFKGLIPYNKKDVDACFVKIDNLAAVFDARLRDYTFVATENISLGDLHAAGSWAFGLATILGPEWRAKHPHLMRWFNTVAASPIVKTPFAEVKLAEKALTYTPPKKQKAEKPKAEKSKAEKKKDEAKPADDAAPAKKPKHPLEALGKSTFVLDDWKRKYSNDDTRPVALPWFWEHYNPEEYSIWKVGYKYNDELTLTFMSNNLVGGFFNRLSASTKYMFGCLVVYGENNNNGIVGAVMVRGQDFAPAFDVAPDWESYEYTKLDPTKEEDKEFVNNMWAWDKPVVVNGEDKEIVDGKVLK

SEQ ID NO: 237 - protein, 92 aa, Saccharomyces cerevisiae
MQFSTVASVAFVALANFVAAESAAAISQITDGQIQATTTATTEATTTAAPSSTVETVSPSSTETISQQTENGAAKAAVGMGAGALAAAAMLL

SEQ ID NO: 238 - protein, 131 aa, Saccharomyces cerevisiae
MSQSRWSIVLIFALFIFGSTGVNAFFNFGHHQQQQQQQQQSYEDQVLNNPCDGYLCPDTLTCVAQQKDCPCPFPKSQLKCVLPDNKFVCISKPATHNEKFRAIYDDPVKGPKAKNKGFRDCGWVSDAYKNH

SEQ ID NO: 239 - protein, 269 aa, Saccharomyces cerevisiae
MSNNKIKRKDASPEQEAIESFTSLTKCDPKVSRKYLQRNHWNINYALNDYYDKEIGTFTDEVSTVAHPPVYPKELTQVFEHYINNNLFDIDSLVKFIEELGYNLEDLATLCLAHLLGYKKLEEPLKREDFLSTWFMQGCSTISDMQECIKTLDVKLHEDLQYFTQIYNYAFNLILDPNRKDIDTDEGIQYWKLFFQPEYPVRMEPDLLEAWFRFLRDEGKTTISKDTWRMLLLFFKRYPTIQKIISDYDETAAWPFIIDEFYECLQDQQ

SEQ ID NO: 240 - protein, 335 aa, Saccharomyces cerevisiae
MSEPAQKKQKVANNSLEQLKASGTVVVADTGDFGSIAKFQPQDSTTNPSLILAAAKQPTYAKLIDVAVEYGKKHGKTTEEQVENAVDRLLVEFGKEILKIVPGRVSTEVDARLSFDTQATIEKARHIIKLFEQEGVSKERVLIKIASTWEGIQAAKELEEKDGIHCNLTLLFSFVQAVACAEAQVTLISPFVGRILDWYKSSTGKDYKGEADPGVISVKKIYNYYKKYGYKTIVMGASFRSTDEIKNLAGVDYLTISPALLDKLMNSTEPFPRVLDPVSAKKEAGDKISYISDESKFRFDLNEDAMATEKLSEGIRKFSADIVTLFDLIEKKVTA

SEQ ID NO: 241 - protein, 113 aa, Saccharomyces cerevisiae
MAGLKDVVTREYTINLHKRLHGVSFKKRAPRAVKEIKKFAKLHMGTEDVRLAPELNQAIWKRGVKGVEYRLRLRISRKRNEEEDAKNPLFSYVEPVLVASAKGLQTVVVEEDA

SEQ ID NO: 242 - protein, 263 aa, Saccharomyces cerevisiae
MRNFFTLFFAAIFSLGALILAIVACAGSTKNYSPINKIYCAELDLSQMKVSTVLPSLSSATLSSLGLPSYINIGLWSYCTVDSSHNIQSCSSPHGIQNFNLSSLVYDNINNNEALELMDSVASVVLPEKLKSKMTYYNNLVKCMFITILIGIVLTFVNLVFNVLRWIIHIRPLTWFGAFFSFFAFAALLVSIGSCLGTYSYIKYILKHNYSDYGISMSIGRNYQGLMWGAVVGALLNFILWCSVRSRPTVIYANAPIEEKPLI

SEQ ID NO: 243 - protein, 128 aa, Saccharomyces cerevisiae
MLVFSFLFVVVSINLNALIFLCKKSWASYLFLYLYNFFFCEDEYKLTKNCVRVEAIAPFMMCLGSLGAILGKQRTANFLLLSYNVINNPVVLVYYVENFSRINFIKHTTKEKSVIWTNERQLNPWICN

SEQ ID NO: 244 - protein, 525 aa, Saccharomyces cerevisiae
MAAGEQVSNMFDTILVLDFGSQYSHLITRRLREFNIYAEMLPCTQKISELGWTPKGVILSGGPYSVYAEDAPHVDHAIFDLNVPILGICYGMQELAWINGKQVGRGDKREYGPATLKVIDDSNSLFKGMNDSTVWMSHGDKLHGLPTGYKTIATSDNSPYCGIVHETKPIYGIQFHPEVTHSTQGKTLLKNFAVDLCHAKQNWTMENFIDTEINRIRKLVGPTAEVIGAVSGGVDSTVASKLMTEAIGDRFHAILVDNGVLRLNEAANVKKTLVEGLGINLMVVDASEEFLSKLKGVTDPEKKRKIIGNTFIHVFEREAEKIKPKDGKEIQFLLQGTLYPDVIESISFKGPSQTIKTHHNVGGLLENMKLKLIEPLRELFKDEVRHLGELLGIPHDLVWRHPFPGPGIAIRVLGEVTKEQVEIARKADNIYIEEIKKAGLYNQISQAFACLLPVKSVGVMGDQRTYDQVIALRAIETTDFMTADWFPFEHSFLKKVASRIVNEVDGVARVTYDITSKPPATVEWE

SEQ ID NO: 245 - protein, 241 aa, Saccharomyces cerevisiae
MVKAVIFTDFDGTVTLEDSNDYLTDTLGFGKEKRLKVFEGVLDDTKSFRQGFMEMLESIHTPFPECIKILEKKIRLDPGFKDTFEWAQENDVPVIVVSSGMKPIIKVLLTRLVGQESIHKIDIVSNEVEIDAHDQWKIIYKDESPFGHDKSRSIDAYKKKFESTLKAGEQRPVYFYCGDGVSDLSAAKECDLLFAKRGKDLVTYCKKQNVPFHEFDTFKDILASMKQVLAGEKTVAELMEN

SEQ ID NO: 246 - protein, 586 aa, Saccharomyces cerevisiae
MSRSNSIYTEDIEMYPTHNEQHLTREYTKPDGQTKSEKLNFEGAYINSHGTLSKTTTREIEGDLDSETSSHSSDDKVDPTQQITAETKAPYTLLSYGQKWGMVAILTMCGFWSSLGSPIYYPALRQLEKQFNVDENMVNVTVVVYLLFQGISPTVSGGLADCFGRRPIILAGMLIYVIASIGLACAPSYGVIIFLRCIQSIGISPTIAISSGVVGDFTLKHERGTFVGATSGFVLLGQCFGSLIGAVLTARWDWRAIFWFLTIGCGSCFLIAFLILPETKRTIAGNLSIKPKRFINRAPIFLLGPVRRRFKYDNPDYETLDPTIPKLDLSSAGKILVLPEIILSLFPSGLLFAMWTLMLSSISSGLSVAPYNYHLVIIGVCYLPGGIGGLMGSFFTGRIIDMYFKRKIKKFEQDKANGLIPQDAEINMFKVRLVCLLPQNFLAVVAYLLFGWSIDKGWRIESILITSFVCSYCAMSTLSTSTTLLVDLYPTKSSTASSCFNFVRCSLSTIFMGCFAKMKAAMTVGGTFTFLCALVFFFNFLMFIPMKYGMKWREDRLLKQQRQSWLNTLAVKAKKGTKRDQNDNHN

SEQ ID NO: 247 - protein, 455 aa, Saccharomyces cerevisiae
MSKLFLDELPESLSRKIGTVVRVLPSSLEIFEELYKYALNENSNDRSGRHKKPRIDVSSDLLKTDEISETNTIFKLEGVSVLSPLRKKLDLVFYLSNVDGSPVITLLKGNDRELSIYQLNKNIKMASFLPVPEKPNLIYLFMTYTSCEDNKFSEPVVMTLNKENTLNQFKNLGLLDSNVTDFEKCVEYIRKQAILTGFKISNPFVNSTLVDTDAEKINSFHLQCHRGTKEGTLYFLPDHIIFGFKKPILLFDASDIESITYSSITRLTFNASLVTKDGEKYEFSMIDQTEYAKIDDYVKRKQMKDKSMSEELKAKSKSKGQATDGTADQPSILQEATRQMQDEKKAGVFSDDDEENDQNFEAESDLSDGSGQESSDGAEDGEEAEEDDEEDDEEEDKKGQSALNRDNSFASINGQPEQELQYKEFKEPLELEDIPIEIDNDDDEDDEDGSGVEYD

SEQ ID NO: 248 - protein, 131 aa, Saccharomyces cerevisiae
MCGIYPYQLVTSSASPKTDVFVSSLPTSPPQALGAASVMALQLVFKNCTISLFISLNSNRKASWPSGDSIFSNCDFGMCSAKNSCSEYVNSPSDWIPMIRDGCWMVERTSVMSSTLSLAKSCVSSLRVMAM

SEQ ID NO: 249 - protein, 661 aa, Saccharomyces cerevisiae
MSGFKCYLQLGDRLSQIWLNKYTLVLLLAMLKLLFFSKSIQHAIEVSETYILSNCYSIDSLYSKMTDNTPHYLGIMGNYLIEKGMEETVKATLETLSLIVYASEGLVNFAIDLYLGTYACLIVSAVDGTVDVATNITEKLISLVNDTVSSVANELDTGLNDISKIINKVIKAASKVENFFTGDDDDSNMTSSIKSVNLTISALHNLYIPSSINDKLEELSAKTPDFAQVKNTTKNLISVPFNEVRKNIKAVNASNIIGDTSVLYVPPVSLDNSTGICSSNQSEILAFYSILGHVLKIATVVCITVLICFAVGAMAPVAWNEIKLWRRLCGMRDHYMLSRQDSYTSFSSENTHELKDPFRDPPIQNGQYDVIASYQQCFQTWNTRIAGWMTNLVTFGKSPENIDPKTKQKIEWVVAYMTSERALCVLGIGLLGILVCICQFVMIALLKHKISHSLTSNDGDGVQNLLKSSTAVDIENQMSLWSVQTNKYINTTETNINQEVFGWINTTTLSVNNTVATMISDIDTTLADVFNGTLLYNPMKTVVGCAIENKLYTIEKAMTWIHDKAQLHIPRINGTQIKQALAKQTDNSTIPTASSTSAATENLLENLVNDMREGLLKILRAYHRITLGELTVALVILAVWLVQLPIALVILRLRLRKATFD

SEQ ID NO: 250 - protein, 384 aa, Saccharomyces cerevisiae
MVTYAGKLVLAPMVRAGELPTRLMALAHGADLVWSPEIIDKKLIQCVRKENTALQTVDYVVPSKVQTRPETLVFRTYPKLESSKLIFQIGSASPALATQAALKVINDVSGIDINAGCPKHFSIHSGMGSALLRTPDTLCLILKELVKNVGNPHSKPISVKIRLLDTKQDTLQLVKRLCATGITNLTVHCRKTEMRNREQPITDYIAEIYEICQANNVSLIVNGAIRDRSHFHDLQANHWKNTNIGGMIAECAERDPTVFDHTSKPSEDGPSWVVACREFIQWATKFDNHIGNTKYMLSRIVPGKSVFFQYFARCKSPEEVSFVLKQLNDDGSAQTDPSEYLENCRAQEKALKNANAIAKQKRKQTDHIGSDTKKQKVVPLPTDI

SEQ ID NO: 251 - protein, 551 aa, Saccharomyces cerevisiae
MTYSTVSINTPPPYLTLACNEKLPTVLSIAGTDPSGGAGIEADVKTITAHRCYAMTCITALNAQTPVKVYSINNTPKEVVFQTLESNLKDMKCNVIKTGMLTAAAIEVLHEKLLQLGENRPKLVVDPVLVATSGSSLAGKDIVSLITEKVAPFADILTPNIPECYKLLGEERKVNGLQDIFQIAKDLAKITKCSNILVKGGHIPWNDEKEKYITDVLFLGAEQKFIIFKGNFVNTTHTHGTGCTLASAIASNLARGYSLPQSVYGGIEYVQNAVAIGCDVTKETVKDNGPINHVYAVEIPLEKMLSDECFTASDVIPKKPLKSAADKIPGGNFYEYLINHPKVKPHWDSYINHEFVKKVADGTLERKKFQFFIEQDYAYLVDYARVHCIAGSKAPCLEDMEKELVIVGGVRTEMGQHEKRLKEVFGVKDPDYFQKIKRGPALRAYSRYFNDVSRRGNWQELVASLTPCLMGYGEALTKMKGKVTAPEGSVYHEWCETYASSWYREAMDEGEKLLNHILETYPPEQLDTLVTIYAEVCELETNFWTAALEYE

SEQ ID NO: 252 - protein, 483 aa, Saccharomyces cerevisiae
MLSATKQTFRSLQIRTMSTNTKHYDYLVIGGGSGGVASARRAASYGAKTLLVEAKALGGTCVNVGCVPKKVMWYASDLATRVSHANEYGLYQNLPLDKEHLTFNWPEFKQKRDAYVHRLNGIYQKNLEKEKVDVVFGWARFNKDGNVEVQKRDNTTEVYSANHILVATGGKAIFPENIPGFELGTDSDGFFRLEEQPKKVVVVGAGYIGIELAGVFHGLGSETHLVIRGETVLRKFDECIQNTITDHYVKEGINVHKLSKIVKVEKNVETDKLKIHMNDSKSIDDVDELIWTIGRKSHLGMGSENVGIKLNSHDQIIADEYQNTNVPNIYSLGDVVGKVELTPVAIAAGRKLSNRLFGPEKFRNDKLDYENVPSVIFSHPEAGSIGISEKEAIEKYGKENIKVYNSKFTAMYYAMLSEKSPTRYKIVCAGPNEKVVGLHIVGDSSAEILQGFGVAIKMGATKADFDNCVAIHPTSAEELVTMR

SEQ ID NO: 253 - protein, 451 aa, Saccharomyces cerevisiae
MDGNDHKVENLGDVDKFYSRIRWNNQFSYMATLPPHLQSEMEGQKSLLMRYDTYRKESSSFSGEGKKVTLQHVPTDFSEASQAVISKKDHDTHASAFVNKIFQPEVAEELIVNRYEKLLSQRPEWHAPWKLSRVINGHLGWVRCVAIDPVDNEWFITGSNDTTMKVWDLATGKLKTTLAGHVMTVRDVAVSDRHPYLFSVSEDKTVKCWDLEKNQIIRDYYGHLSGVRTVSIHPTLDLIATAGRDSVIKLWDMRTRIPVITLVGHKGPINQVQCTPVDPQVVSSSTDATVRLWDVVAGKTMKVLTHHKRSVRATALHPKEFSVASACTDDIRSWGLAEGSLLTNFESEKTGIINTLSINQDDVLFAGGDNGVLSFYDYKSGHKYQSLATREMVGSLEGERSVLCSTFDKTGLRLITGEADKSIKIWKQDETATKESEPGLAWNPNLSAKRF

SEQ ID NO: 254 - protein, 137 aa, Saccharomyces cerevisiae
MKRNIIYYTLRLLPHGIMLVHSLNQFIDEFFTVTERTTLDEMLELSWDTPTTRWVGQLEWPQKVVSLLEVWTNSDDFVNQIVNGQDTILTQVGFDDSIVGQWNSLLVDLTETSLVDQLSNSRVGWVTVSNVWFNQLQ

SEQ ID NO: 255 - protein, 449 aa, Saccharomyces cerevisiae
MLRISIDSIKQFGSFVTGYNNTSYHAAGRAIRTSSLYSTMISANPRRCLHSSKLLNKEGQEEGYNEQLISKMSSQNGSNSRQNESEGKKEGKASSVKSLLQHTHSHSHTHMHDNPLLSLNVQQIKKNPGVRITWIGLASNVGMAVGKFVGGITFHSQALLADSVHALSDLVSDFLTLFSVQYASRKPTSEYPYGYGKVETVGSLAVSTILAMAGISIGWSSLCAIVGPVIPHAILESMAGLIGETHSHSQSLTQQATNVNAVWIAAGSILVKEWVFQATKKVAIQTNSNVLMANAWHHRVDSLTSLVALVAITSSYFFNIQSLDNLGGLVVSGLIIKTGGQGILSSLKELVDQSIPPTDPRYLEIESVIKDSIGSLKTDLDLKQSLHVRDLTILASGPNLRATTTLEVPVLHSGQEVGIRFLENAISTIREDLRMKVPNVGRWTSSLLM

SEQ ID NO: 256 - protein, 1065 aa, Saccharomyces cerevisiae
MDYLKPAQKGRRRGLSINSLSETQQSAMNSSLDHLQNDLNRINLQWNRILSDNTNPLELALAFLDDTSVGLGHRYEEFNQLKSQIGSHLQDVVNEHSQVFNTNVASYGKAVSSIMQAQEQTLNLKNCLKEANEKITTDKGSLQELNDNNLKYTKMIDVLVNIEELLQIPEKIEENIRKENFHQVQILLERGFILMNNKSLKTVEILKPINQQLELQEHLLFNNLIEEIHDIMYSKSNKTNFTRVTNNDIFKIISISHNGFTSLENYLYNIVNIDIMEHSKTINKNLEQFIHDQSLNKGNIMLQENAATQAPLAPSRNQENEGFNRIGFLLKTINNINKLPVAFNIITERAKEEIHNIIVKSTESIRSKHPSLLKMATSLKNDNHFGLPVQDILSIILRECFWEIFLKLLYAIQCHRAIFEMSNILQPTSSAKPAFKFNKIWGKLLDEIELLLVRYINDPELISSNNGSIKPINGATNNAPTLPKRKNPKIFSLEYNIEDNSSVKDQAFELKALLKDIFPGFSVSSNMDLDSIYVKDESFEQDEPLVPPSVFNMKVILDPFLLFTQSTSTIVPSVLTQNTISSLTFFDDYMNKSFLPKIQMTMDYLFTVEVESNNPYALELSDENHNIFKTALDFQRLFYNLLNVFNTANTFREKISYCILDLLNHFYNYYLGLFNSLIGTSDRHLTRKIITAWLQNGILMDQEQKILNGDETLFHEESIELFKEIPHFYQAGKGLSKSDLFNNLTLDTILQFSASVLWILNWLPGLKKAINIDEVSQEPMLDADRLRSSWTFSESMDLNYSNPSSSPNSLGNLKILLDDKASKKFDETIDGFKTLKFKLITILRFNIRALCIYDIGSFFQNTKIWNMDVGSIELDQNIASLISELRRTESKLKQQLPEKEKNSIFIGLDIVNNYALIKGAKSIKVLNHNGIKKMLRNVNVLQHAYRNLSSEPSKINMNVTMNFYSLCGSSEAELFEYIKDNELPHCSVEDLKTILRLQFSEEMHRQLKRQSTSSTKGSIKPSNKRYTEALEKLSNLEKEQSKEGARTKIGKLKSKLNAVHTANEK

SEQ ID NO: 257 - DNA, 22 bp, Artificial Sequence
  Description of Artificial Sequence: Synthetic primer
atgaagctgatacgcggcatac

SEQ ID NO: 258 - DNA, 23 bp, Artificial Sequence
  Description of Artificial Sequence: Synthetic primer
atgttagaagatctcaaacgcca

SEQ ID NO: 259 - DNA, 26 bp, Artificial Sequence
  Description of Artificial Sequence: Synthetic primer
atgtctaaaaaattaggttttgccct

SEQ ID NO: 260 - DNA, 24 bp, Artificial Sequence
  Description of Artificial Sequence: Synthetic primer
atgctcccgccttattttttgttc

SEQ ID NO: 261 - DNA, 23 bp, Artificial Sequence
  Description of Artificial Sequence: Synthetic primer
atgctacaatgtggcgcgaagaa

SEQ ID NO: 262 - DNA, 25 bp, Artificial Sequence
  Description of Artificial Sequence: Synthetic primer
atgagtataaaaaatctacctgccg

SEQ ID NO: 263 - DNA, 27 bp, Artificial Sequence
  Description of Artificial Sequence: Synthetic primer
atgatgcagttagttcacttatttatg

SEQ ID NO: 264 - DNA, 22 bp, Artificial Sequence
  Description of Artificial Sequence: Synthetic primer
atggatagcgcacgcgccctta

SEQ ID NO: 265 - DNA, 25 bp, Artificial Sequence
  Description of Artificial Sequence: Synthetic primer
atgaaattgccagtcagagaatttg

SEQ ID NO: 266 - DNA, 23 bp, Artificial Sequence
  Description of Artificial Sequence: Synthetic primer
atgcagaacagcgctttgaaagc

SEQ ID NO: 267 - DNA, 23 bp, Artificial Sequence
  Description of Artificial Sequence: Synthetic primer
atggaaaagggtactgttaagtg

SEQ ID NO: 268 - DNA, 25 bp, Artificial Sequence
  Description of Artificial Sequence: Synthetic primer
atgaatttattaaaatcgctggccg

SEQ ID NO: 269 - DNA, 28 bp, Artificial Sequence
  Description of Artificial Sequence: Synthetic primer
atgattaaatttctctctgcattaattc

SEQ ID NO: 270 - DNA, 23 bp, Artificial Sequence
  Description of Artificial Sequence: Synthetic primer
atgcgcgtactggttgttgaaga

SEQ ID NO: 271 - DNA, 20 bp, Artificial Sequence
  Description of Artificial Sequence: Synthetic primer
atgagtaatcaggaaccggc

SEQ ID NO: 272 - DNA, 24 bp, Artificial Sequence
  Description of Artificial Sequence: Synthetic primer
atgagcacaaaaccactcttcctg

SEQ ID NO: 273 - DNA, 23 bp, Artificial Sequence
  Description of Artificial Sequence: Synthetic primer
atgacaacgtttcattccttaac

SEQ ID NO: 274 - DNA, 27 bp, Artificial Sequence
  Description of Artificial Sequence: Synthetic primer
atgtcaaataaaatgactggtttagta

SEQ ID NO: 275 - DNA, 25 bp, Artificial Sequence
  Description of Artificial Sequence: Synthetic primer
atgtcatctgaaaaactgtattccc

SEQ ID NO: 276 - DNA, 24 bp, Artificial Sequence
  Description of Artificial Sequence: Synthetic primer
atgccaaaaattaagaccgtacgc

SEQ ID NO: 277 - DNA, 25 bp, Artificial Sequence
  Description of Artificial Sequence: Synthetic primer
atgactatcaaagtaggtatcaacg

SEQ ID NO: 278 - DNA, 25 bp, Artificial Sequence
  Description of Artificial Sequence: Synthetic primer
atggatataatgagaagtgttgtgg

SEQ ID NO: 279 - DNA, 24 bp, Artificial Sequence
  Description of Artificial Sequence: Synthetic primer
atgaggtttttattgggcgtgctg

SEQ ID NO: 280 - DNA, 23 bp, Artificial Sequence
  Description of Artificial Sequence: Synthetic primer
atgaatattcgccgtaaaaaccg

SEQ ID NO: 281 - DNA, 23 bp, Artificial Sequence
  Description of Artificial Sequence: Synthetic primer
atgagcgaccttgcgagagaaat

SEQ ID NO: 282 - DNA, 24 bp, Artificial Sequence
  Description of Artificial Sequence: Synthetic primer
atgacaacggtaacgcccacatat

SEQ ID NO: 283 - DNA, 23 bp, Artificial Sequence
  Description of Artificial Sequence: Synthetic primer
atggattatacgctcacccgcat

SEQ ID NO: 284 - DNA, 27 bp, Artificial Sequence
  Description of Artificial Sequence: Synthetic primer
atgctgaagttactgaaaactattatg

SEQ ID NO: 285 - DNA, 24 bp, Artificial Sequence
  Description of Artificial Sequence: Synthetic primer
atggctatcgacgaaaacaaacag

SEQ ID NO: 286 - DNA, 23 bp, Artificial Sequence
  Description of Artificial Sequence: Synthetic primer
atgagtgcaatagaaaatttcga

SEQ ID NO: 287 - DNA, 28 bp, Artificial Sequence
  Description of Artificial Sequence: Synthetic primer
atgatgaaatcgttaattatcgttaatc

SEQ ID NO: 288 - DNA, 22 bp, Artificial Sequence
  Description of Artificial Sequence: Synthetic primer
atgtctgtaattaagatgaccg

SEQ ID NO: 289 - DNA, 24 bp, Artificial Sequence
  Description of Artificial Sequence: Synthetic primer
atgaaagatgaacgtcgccctatt

SEQ ID NO: 290 - DNA, 26 bp, Artificial Sequence
  Description of Artificial Sequence: Synthetic primer
atgctaaatttatttgttggccttga

SEQ ID NO: 291 - DNA, 22 bp, Artificial Sequence
  Description of Artificial Sequence: Synthetic primer
atgacgcaaacttataacgctg

SEQ ID NO: 292 - DNA, 21 bp, Artificial Sequence
  Description of Artificial Sequence: Synthetic primer
atggctggacgaatcccacgc

SEQ ID NO: 293 - DNA, 22 bp, Artificial Sequence
  Description of Artificial Sequence: Synthetic primer
atggagcaaaacccgcagtcac

SEQ ID NO: 294 - DNA, 24 bp, Artificial Sequence
  Description of Artificial Sequence: Synthetic primer
atgtggcgcagactgatttatcac

SEQ ID NO: 295 - DNA, 24 bp, Artificial Sequence
  Description of Artificial Sequence: Synthetic primer
atgattgttttacccagacgcctg

SEQ ID NO: 296 - DNA, 24 bp, Artificial Sequence
  Description of Artificial Sequence: Synthetic primer
atgcgtaactttgatttatccccg

SEQ ID NO: 297 - DNA, 24 bp, Artificial Sequence
  Description of Artificial Sequence: Synthetic primer
atgaccgatttacacaccgatgta

SEQ ID NO: 298 - DNA, 22 bp, Artificial Sequence
  Description of Artificial Sequence: Synthetic primer
atgttgaccccgttgacggcct

SEQ ID NO: 299 - DNA, 25 bp, Artificial Sequence
  Description of Artificial Sequence: Synthetic primer
atgaaaaagattgcatttggctgtg

SEQ ID NO: 300 - DNA, 24 bp, Artificial Sequence
  Description of Artificial Sequence: Synthetic primer
atgacggttcctacctatgacaaa

SEQ ID NO: 301 - DNA, 25 bp, Artificial Sequence
  Description of Artificial Sequence: Synthetic primer
atgtcaaaagctgtcggtattgatt

SEQ ID NO: 302 - DNA, 24 bp, Artificial Sequence
  Description of Artificial Sequence: Synthetic primer
atgtccgacgaaattgtttggcaa

SEQ ID NO: 303 - DNA, 24 bp, Artificial Sequence
  Description of Artificial Sequence: Synthetic primer
atggtacgtcgatggattcctagt

SEQ ID NO: 304 - DNA, 25 bp, Artificial Sequence
  Description of Artificial Sequence: Synthetic primer
atgcaaacaccttcagaaaataccg

SEQ ID NO: 305 - DNA, 24 bp, Artificial Sequence
  Description of Artificial Sequence: Synthetic primer
atgccacaagtacagtcgtggttt

SEQ ID NO: 306 - DNA, 24 bp, Artificial Sequence
  Description of Artificial Sequence: Synthetic primer
atgaataccaacgagtccgaacat

SEQ ID NO: 307 - DNA, 25 bp, Artificial Sequence
  Description of Artificial Sequence: Synthetic primer
atgttgttcaaaccaaaaacacgag

SEQ ID NO: 308 - DNA, 23 bp, Artificial Sequence
  Description of Artificial Sequence: Synthetic primer
atgtccctacggccttgtctaac

SEQ ID NO: 309 - DNA, 25 bp, Artificial Sequence
  Description of Artificial Sequence: Synthetic primer
atgattgtggggttgacactttatt

SEQ ID NO: 310 - DNA, 25 bp, Artificial Sequence
  Description of Artificial Sequence: Synthetic primer
atggaaaagctattacagtggtcta

SEQ ID NO: 311 - DNA, 24 bp, Artificial Sequence
  Description of Artificial Sequence: Synthetic primer
atgcattgcccaatttgccaccat

SEQ ID NO: 312 - DNA, 28 bp, Artificial Sequence
  Description of Artificial Sequence: Synthetic primer
atgaatataatgaaaagacaattatgca

SEQ ID NO: 313 - DNA, 24 bp, Artificial Sequence
  Description of Artificial Sequence: Synthetic primer
atgaatatggcagaacgtgcagaa

SEQ ID NO: 314 - DNA, 24 bp, Artificial Sequence
  Description of Artificial Sequence: Synthetic primer
atgttgcgacttttttcactggca

SEQ ID NO: 315 - DNA, 25 bp, Artificial Sequence
  Description of Artificial Sequence: Synthetic primer
atgaaacctccgttaaacatgtcac

SEQ ID NO: 316 - DNA, 26 bp, Artificial Sequence
  Description of Artificial Sequence: Synthetic primer
atgttctcatattcagatttctgttc

SEQ ID NO: 317 - DNA, 26 bp, Artificial Sequence
  Description of Artificial Sequence: Synthetic primer
atgaatttagaagagagccaatcaaa

SEQ ID NO: 318 - DNA, 26 bp, Artificial Sequence
  Description of Artificial Sequence: Synthetic primer
atgaaagagaatgaagtcaaagatga

SEQ ID NO: 319 - DNA, 26 bp, Artificial Sequence
  Description of Artificial Sequence: Synthetic primer
atgactgttataaagacagaaccaac

SEQ ID NO: 320 - DNA, 27 bp, Artificial Sequence
  Description of Artificial Sequence: Synthetic primer
atgatttatatgttggtttttctggat

SEQ ID NO: 321 - DNA, 25 bp, Artificial Sequence
  Description of Artificial Sequence: Synthetic primer
atgtgggattcgttaattgtaagca

SEQ ID NO: 322 - DNA, 27 bp, Artificial Sequence
  Description of Artificial Sequence: Synthetic primer
atggatttttatactactgatatcaac

SEQ ID NO: 323 - DNA, 23 bp, Artificial Sequence
  Description of Artificial Sequence: Synthetic primer
atgccttgcttgttgccacctac

SEQ ID NO: 324 - DNA, 25 bp, Artificial Sequence
  Description of Artificial Sequence: Synthetic primer
atggacgcattgaactccaaagaac

SEQ ID NO: 325 - DNA, 26 bp, Artificial Sequence
  Description of Artificial Sequence: Synthetic primer
atgagtctttctttccttctcttttc

SEQ ID NO: 326 - DNA, 23 bp, Artificial Sequence
  Description of Artificial Sequence: Synthetic primer
atgaaggacagtgtagactgccc

SEQ ID NO: 327 - DNA, 24 bp, Artificial Sequence
  Description of Artificial Sequence: Synthetic primer
atgaatttcaaggagccgctagtg

SEQ ID NO: 328 - DNA, 24 bp, Artificial Sequence
  Description of Artificial Sequence: Synthetic primer
atggccgatgaggaacgtttaaag

SEQ ID NO: 329 - DNA, 25 bp, Artificial Sequence
  Description of Artificial Sequence: Synthetic primer
atggcagatcaagtaccagttacaa

SEQ ID NO: 330 - DNA, 23 bp, Artificial Sequence
  Description of Artificial Sequence: Synthetic primer
atgtccacaactgattcggggtt

SEQ ID NO: 331 - DNA, 26 bp, Artificial Sequence
  Description of Artificial Sequence: Synthetic primer
atgaaactggatagtatagacattac

SEQ ID NO: 332 - DNA, 25 bp, Artificial Sequence
  Description of Artificial Sequence: Synthetic primer
atgaatagcgagtacgattacctgt

SEQ ID NO: 333 - DNA, 26 bp, Artificial Sequence
  Description of Artificial Sequence: Synthetic primer
atgatttcacccataagctttctatc

SEQ ID NO: 334 - DNA, 25 bp, Artificial Sequence
  Description of Artificial Sequence: Synthetic primer
atgaatagggacaacatggacacaa

SEQ ID NO: 335 - DNA, 25 bp, Artificial Sequence
  Description of Artificial Sequence: Synthetic primer
atggaagaagtgaaagcagtcaatt

SEQ ID NO: 336 - DNA, 25 bp, Artificial Sequence
  Description of Artificial Sequence: Synthetic primer
atgagcattctatcatccacacaat

SEQ ID NO: 337 - DNA, 24 bp, Artificial Sequence
  Description of Artificial Sequence: Synthetic primer
atggacctagatctagccagtatc

SEQ ID NO: 338 - DNA, 26 bp, Artificial Sequence
  Description of Artificial Sequence: Synthetic primer
atgaatagtaatgaactggatctaag

SEQ ID NO: 339 - DNA, 24 bp, Artificial Sequence
  Description of Artificial Sequence: Synthetic primer
atgacagcctcatcaaatgacgat

SEQ ID NO: 340 - DNA, 24 bp, Artificial Sequence
  Description of Artificial Sequence: Synthetic primer
atgtctcgccaaagcgcattcaaa

SEQ ID NO: 341 - DNA, 24 bp, Artificial Sequence
  Description of Artificial Sequence: Synthetic primer
atgtctttcttaggtttcggtggt

SEQ ID NO: 342 - DNA, 25 bp, Artificial Sequence
  Description of Artificial Sequence: Synthetic primer
atggcagactttaaatctttaggtc

SEQ ID NO: 343 - DNA, 24 bp, Artificial Sequence
  Description of Artificial Sequence: Synthetic primer
atggctagaggaccgtatgttgat

SEQ ID NO: 344 - DNA, 24 bp, Artificial Sequence
  Description of Artificial Sequence: Synthetic primer
atgtgcctaggtaagctgtacttc

SEQ ID NO: 345 - DNA, 23 bp, Artificial Sequence
  Description of Artificial Sequence: Synthetic primer
atgaggagagagaggcaaaggat

SEQ ID NO: 346 - DNA, 26 bp, Artificial Sequence
  Description of Artificial Sequence: Synthetic primer
atgaatttctccacagtttttcaagc

SEQ ID NO: 347 - DNA, 24 bp, Artificial Sequence
  Description of Artificial Sequence: Synthetic primer
atggccaggaaattgaagggtaag

SEQ ID NO: 348 - DNA, 27 bp, Artificial Sequence
  Description of Artificial Sequence: Synthetic primer
atgtatatatatgttgaagtgtgtaca

SEQ ID NO: 349 - DNA, 25 bp, Artificial Sequence
  Description of Artificial Sequence: Synthetic primer
atgacaccagacgaactaaattcag

SEQ ID NO: 350 - DNA, 25 bp, Artificial Sequence
  Description of Artificial Sequence: Synthetic primer
atgtccgtacaaaaagaagaatacg

SEQ ID NO: 351 - DNA, 25 bp, Artificial Sequence
  Description of Artificial Sequence: Synthetic primer
atgactatttcttctgcacatccag

SEQ ID NO: 352 - DNA, 25 bp, Artificial Sequence
  Description of Artificial Sequence: Synthetic primer
atgggaaagactaaaacaagaggca

SEQ ID NO: 353 - DNA, 23 bp, Artificial Sequence
  Description of Artificial Sequence: Synthetic primer
atgccaaatactgctccgccact

SEQ ID NO: 354 - DNA, 26 bp, Artificial Sequence
  Description of Artificial Sequence: Synthetic primer
atgaggttccagcttttcatatattt

SEQ ID NO: 355 - DNA, 25 bp, Artificial Sequence
  Description of Artificial Sequence: Synthetic primer
atggacagagaccatattaatgacc

SEQ ID NO: 356 - DNA, 25 bp, Artificial Sequence
  Description of Artificial Sequence: Synthetic primer
atggtagctagttgtaaagatcaga

SEQ ID NO: 357 - DNA, 24 bp, Artificial Sequence
  Description of Artificial Sequence: Synthetic primer
atgaacaacacttccataaccgga

SEQ ID NO: 358 - DNA, 28 bp, Artificial Sequence
  Description of Artificial Sequence: Synthetic primer
atgatttctgctaattcattacttattt

SEQ ID NO: 359 - DNA, 27 bp, Artificial Sequence
  Description of Artificial Sequence: Synthetic primer
atgcaagaattttattctttttcacca

SEQ ID NO: 360 - DNA, 24 bp, Artificial Sequence
  Description of Artificial Sequence: Synthetic primer
atgaattccggaggtgaagaacca

SEQ ID NO: 361 - DNA, 25 bp, Artificial Sequence
  Description of Artificial Sequence: Synthetic primer
atggctaaagatttattgcccaagc

SEQ ID NO: 362 - DNA, 26 bp, Artificial Sequence
  Description of Artificial Sequence: Synthetic primer
atgtcccaaggtactttatacattaa

SEQ ID NO: 363 - DNA, 24 bp, Artificial Sequence
  Description of Artificial Sequence: Synthetic primer
atgcaattctctactgtcgcttcc

SEQ ID NO: 364 - DNA, 24 bp, Artificial Sequence
  Description of Artificial Sequence: Synthetic primer
atgagtcaaagtcgctggagtatc

SEQ ID NO: 365 - DNA, 28 bp, Artificial Sequence
  Description of Artificial Sequence: Synthetic primer
atggtatgtttttaatttcgtttcttta

SEQ ID NO: 366 - DNA, 25 bp, Artificial Sequence
  Description of Artificial Sequence: Synthetic primer
atgtctgaaccagctcaaaagaaac

SEQ ID NO: 367 - DNA, 24 bp, Artificial Sequence
  Description of Artificial Sequence: Synthetic primer
atggccggtttaaaagacgttgtc

SEQ ID NO: 368 - DNA, 28 bp, Artificial Sequence
  Description of Artificial Sequence: Synthetic primer
atgaggaattttttcacgttattttttg

SEQ ID NO: 369 - DNA, 27 bp, Artificial Sequence
  Description of Artificial Sequence: Synthetic primer
atgcttgttttttcttttctgtttgtt

SEQ ID NO: 370 - DNA, 23 bp, Artificial Sequence
  Description of Artificial Sequence: Synthetic primer
atggctgccggtgaacaagtttc

SEQ ID NO: 371 - DNA, 25 bp, Artificial Sequence
  Description of Artificial Sequence: Synthetic primer
atggtcaaagctgttatttttaccg

SEQ ID NO: 372 - DNA, 26 bp, Artificial Sequence
  Description of Artificial Sequence: Synthetic primer
atgtcacgaagtaacagtatatacac

SEQ ID NO: 373 - DNA, 27 bp, Artificial Sequence
  Description of Artificial Sequence: Synthetic primer
atgtcaaaattgttcttagatgaactg

SEQ ID NO: 374 - DNA, 24 bp, Artificial Sequence
  Description of Artificial Sequence: Synthetic primer
atgtgtggtatctatccctaccag

SEQ ID NO: 375 - DNA, 25 bp, Artificial Sequence
  Description of Artificial Sequence: Synthetic primer
atgagcggttttaaatgctatttgc

SEQ ID NO: 376 - DNA, 25 bp, Artificial Sequence
  Description of Artificial Sequence: Synthetic primer
atggttacatatgctggaaaactgg

SEQ ID NO: 377 - DNA, 25 bp, Artificial Sequence
  Description of Artificial Sequence: Synthetic primer
atgacctattctacagttagcatca

SEQ ID NO: 378 - DNA, 25 bp, Artificial Sequence
  Description of Artificial Sequence: Synthetic primer
atgctttctgcaaccaaacaaacat

SEQ ID NO: 379 - DNA, 24 bp, Artificial Sequence
  Description of Artificial Sequence: Synthetic primer
atggacggaaatgatcacaaagtc

SEQ ID NO: 380 - DNA, 30 bp, Artificial Sequence
  Description of Artificial Sequence: Synthetic primer
atgaagagaaatattatttattatacattg

SEQ ID NO: 381 - DNA, 25 bp, Artificial Sequence
  Description of Artificial Sequence: Synthetic primer
atgctacggataagtattgactcta

SEQ ID NO: 382 - DNA, 24 bp, Artificial Sequence
  Description of Artificial Sequence: Synthetic primer
atggattacctaaaaccagcgcag

SEQ ID NO: 383 - DNA, 24 bp, Artificial Sequence
  Description of Artificial Sequence: Synthetic primer
ttaagccggttttgttagcccaaa

SEQ ID NO: 384 - DNA, 24 bp, Artificial Sequence
  Description of Artificial Sequence: Synthetic primer
ttactgcccgtaatatgccttcgc

SEQ ID NO: 385 - DNA, 26 bp, Artificial Sequence
  Description of Artificial Sequence: Synthetic primer
ttactgataagtaatggtgtatgcag

SEQ ID NO: 386 - DNA, 26 bp, Artificial Sequence
  Description of Artificial Sequence: Synthetic primer
ttagcatgacgcatttgagaatgttg

SEQ ID NO: 387 - DNA, 25 bp, Artificial Sequence
  Description of Artificial Sequence: Synthetic primer
ttacgaatactttttcgtccgtcgc

SEQ ID NO: 388 - DNA, 23 bp, Artificial Sequence
  Description of Artificial Sequence: Synthetic primer
ttatgcacctgcggcaatcagta

SEQ ID NO: 389 - DNA, 22 bp, Artificial Sequence
  Description of Artificial Sequence: Synthetic primer
ttaccgctgcgtcaccccttcg

SEQ ID NO: 390 - DNA, 27 bp, Artificial Sequence
  Description of Artificial Sequence: Synthetic primer
ttatatttccagacatctgttatcact

SEQ ID NO: 391 - DNA, 24 bp, Artificial Sequence
  Description of Artificial Sequence: Synthetic primer
ttagtaagtacgaatcttcggcgg

SEQ ID NO: 392 - DNA, 23 bp, Artificial Sequence
  Description of Artificial Sequence: Synthetic primer
ttattcgacgttcagcgcgtcat

SEQ ID NO: 393 - DNA, 24 bp, Artificial Sequence
  Description of Artificial Sequence: Synthetic primer
ttatgcgactgccgcttctacttc

SEQ ID NO: 394 - DNA, 19 bp, Artificial Sequence
  Description of Artificial Sequence: Synthetic primer
ttacaccgtccggcgggca

SEQ ID NO: 395 - DNA, 25 bp, Artificial Sequence
  Description of Artificial Sequence: Synthetic primer
ttagatgatttccagttttgcccgc

SEQ ID NO: 396 - DNA, 25 bp, Artificial Sequence
  Description of Artificial Sequence: Synthetic primer
ttagcgcaattcgaacagatagccc

SEQ ID NO: 397 - DNA, 25 bp, Artificial Sequence
  Description of Artificial Sequence: Synthetic primer
ttagaaaatgcgctcctgatgcacc

SEQ ID NO: 398 - DNA, 25 bp, Artificial Sequence
  Description of Artificial Sequence: Synthetic primer
ttagtcatttgcatattccttagcc

SEQ ID NO: 399 - DNA, 24 bp, Artificial Sequence
  Description of Artificial Sequence: Synthetic primer
ttatgccatccccttcgcgtcaaa

SEQ ID NO: 400 - DNA, 26 bp, Artificial Sequence
  Description of Artificial Sequence: Synthetic primer
ttaatcagtaatgatgacatttgctg

SEQ ID NO: 401 - DNA, 24 bp, Artificial Sequence
  Description of Artificial Sequence: Synthetic primer
ttacaacgtcgggtaatcggtata

SEQ ID NO: 402 - DNA, 21 bp, Artificial Sequence
  Description of Artificial Sequence: Synthetic primer
ttatgcgtacggcaggcacgc

SEQ ID NO: 403 - DNA, 24 bp, Artificial Sequence
  Description of Artificial Sequence: Synthetic primer
ttatttggagatgtgagcgatcag

SEQ ID NO: 404 - DNA, 24 bp, Artificial Sequence
  Description of Artificial Sequence: Synthetic primer
ttacgccagaccaataaagaaccc

SEQ ID NO: 405 - DNA, 23 bp, Artificial Sequence
  Description of Artificial Sequence: Synthetic primer
ttatttactctcctgcggcgaca

SEQ ID NO: 406 - DNA, 26 bp, Artificial Sequence
  Description of Artificial Sequence: Synthetic primer
ttatgatgctgggtccttataaacac

SEQ ID NO: 407 - DNA, 24 bp, Artificial Sequence
  Description of Artificial Sequence: Synthetic primer
ttattcttcttctggctcgtcgtc

SEQ ID NO: 408 - DNA, 23 bp, Artificial Sequence
  Description of Artificial Sequence: Synthetic primer
ttaatgatgtgccacgtcggtct

SEQ ID NO: 409 - DNA, 24 bp, Artificial Sequence
  Description of Artificial Sequence: Synthetic primer
ttaaatctcgtcaggtgtacgcag

SEQ ID NO: 410 - DNA, 24 bp, Artificial Sequence
  Description of Artificial Sequence: Synthetic primer
ttatagctgctccttagccaccag

SEQ ID NO: 411 - DNA, 27 bp, Artificial Sequence
  Description of Artificial Sequence: Synthetic primer
ttaaaaatcttcgttagtttctgctac

SEQ ID NO: 412 - DNA, 23 bp, Artificial Sequence
  Description of Artificial Sequence: Synthetic primer
ttacaccaggctcttcaagcgat

SEQ ID NO: 413 - DNA, 24 bp, Artificial Sequence
  Description of Artificial Sequence: Synthetic primer
ttagagaggattctcaccgctggc

SEQ ID NO: 414 - DNA, 23 bp, Artificial Sequence
  Description of Artificial Sequence: Synthetic primer
ttacttcttagcgcgctcttcga

SEQ ID NO: 415 - DNA, 24 bp, Artificial Sequence
  Description of Artificial Sequence: Synthetic primer
ttaactcaggttcatctccagcgg

SEQ ID NO: 416 - DNA, 24 bp, Artificial Sequence
  Description of Artificial Sequence: Synthetic primer
ttaaatcaactgcaatgctatcca

SEQ ID NO: 417 - DNA, 24 bp, Artificial Sequence
  Description of Artificial Sequence: Synthetic primer
ttaaacctcaatctccgccatgtc

SEQ ID NO: 418 - DNA, 25 bp, Artificial Sequence
  Description of Artificial Sequence: Synthetic primer
ttactttttcgccagctcctggttt

SEQ ID NO: 419 - DNA, 23 bp, Artificial Sequence
  Description of Artificial Sequence: Synthetic primer
ttaatcgtccaggaagctacgca

SEQ ID NO: 420 - DNA, 22 bp, Artificial Sequence
  Description of Artificial Sequence: Synthetic primer
ttacgccttcgaatcccgcaac

SEQ ID NO: 421 - DNA, 25 bp, Artificial Sequence
  Description of Artificial Sequence: Synthetic primer
ttatgcgtttttctccctcgaatgc

SEQ ID NO: 422 - DNA, 23 bp, Artificial Sequence
  Description of Artificial Sequence: Synthetic primer
ttagttgatttcgatacggcgcg

SEQ ID NO: 423 - DNA, 22 bp, Artificial Sequence
  Description of Artificial Sequence: Synthetic primer
ttatttcccccgtttggcgcgt

SEQ ID NO: 424 - DNA, 23 bp, Artificial Sequence
  Description of Artificial Sequence: Synthetic primer
ttattcatcgcgcttcttccccc

SEQ ID NO: 425 - DNA, 25 bp, Artificial Sequence
  Description of Artificial Sequence: Synthetic primer
ttaatttctccgctgctctattgcc

SEQ ID NO: 426 - DNA, 28 bp, Artificial Sequence
  Description of Artificial Sequence: Synthetic primer
ttactcaaaatagtccatatccagtttc

SEQ ID NO: 427 - DNA, 25 bp, Artificial Sequence
  Description of Artificial Sequence: Synthetic primer
ttaatcaacttcttcaacggttgga

SEQ ID NO: 428 - DNA, 24 bp, Artificial Sequence
  Description of Artificial Sequence: Synthetic primer
ttattgtgccacttcttgctcagc

SEQ ID NO: 429 - DNA, 25 bp, Artificial Sequence
  Description of Artificial Sequence: Synthetic primer
ttagggattgttgattgataggttg

SEQ ID NO: 430 - DNA, 25 bp, Artificial Sequence
  Description of Artificial Sequence: Synthetic primer
tcaaggtaaatcagcgtcaggatat

SEQ ID NO: 431 - DNA, 23 bp, Artificial Sequence
  Description of Artificial Sequence: Synthetic primer
tcaaaccagcagccataccttcg

SEQ ID NO: 432 - DNA, 22 bp, Artificial Sequence
  Description of Artificial Sequence: Synthetic primer
tcaaggcacctcttcgtcgtcc

SEQ ID NO: 433 - DNA, 25 bp, Artificial Sequence
  Description of Artificial Sequence: Synthetic primer
tcagctctcataactatcgcaagaa

SEQ ID NO: 434 - DNA, 25 bp, Artificial Sequence
  Description of Artificial Sequence: Synthetic primer
tcaatatggagggtagaacaacagt

SEQ ID NO: 435 - DNA, 23 bp, Artificial Sequence
  Description of Artificial Sequence: Synthetic primer
tcaggctggtggtaaaaaagctg

SEQ ID NO: 436 - DNA, 27 bp, Artificial Sequence
  Description of Artificial Sequence: Synthetic primer
tcataatacatactttacggctaaata

SEQ ID NO: 437 - DNA, 22 bp, Artificial Sequence
  Description of Artificial Sequence: Synthetic primer
ctagcctaccacgtaccatcgg

SEQ ID NO: 438 - DNA, 26 bp, Artificial Sequence
  Description of Artificial Sequence: Synthetic primer
ttacttttcgttaattgaagagagga

SEQ ID NO: 439 - DNA, 26 bp, Artificial Sequence
  Description of Artificial Sequence: Synthetic primer
ctacaatttggaattatcaatcacct

SEQ ID NO: 440 - DNA, 24 bp, Artificial Sequence
  Description of Artificial Sequence: Synthetic primer
tcaacgtactgtccataggttgtc

SEQ ID NO: 441 - DNA, 22 bp, Artificial Sequence
  Description of Artificial Sequence: Synthetic primer
ctaggcaactgccatgtctcca

SEQ ID NO: 442 - DNA, 25 bp, Artificial Sequence
  Description of Artificial Sequence: Synthetic primer
ctattttttggcgttcttcctcttt

SEQ ID NO: 443 - DNA, 25 bp, Artificial Sequence
  Description of Artificial Sequence: Synthetic primer
tcaaattttgaagccgaagttggta

SEQ ID NO: 444 - DNA, 27 bp, Artificial Sequence
  Description of Artificial Sequence: Synthetic primer
tcatttcttcattaaagactcttcatt

SEQ ID NO: 445 - DNA, 28 bp, Artificial Sequence
  Description of Artificial Sequence: Synthetic primer
ttatataatattgagaatttcattagcc

SEQ ID NO: 446 - DNA, 26 bp, Artificial Sequence
  Description of Artificial Sequence: Synthetic primer
tcaaatcaaaacaacaggatatcgac

SEQ ID NO: 447 - DNA, 24 bp, Artificial Sequence
  Description of Artificial Sequence: Synthetic primer
ctaattaactgacccttcgccaag

SEQ ID NO: 448 - DNA, 27 bp, Artificial Sequence
  Description of Artificial Sequence: Synthetic primer
ttattttttgtcctttttggccaattt

SEQ ID NO: 449 - DNA, 23 bp, Artificial Sequence
  Description of Artificial Sequence: Synthetic primer
tcactctgccaccatcgtaatgg

SEQ ID NO: 450 - DNA, 23 bp, Artificial Sequence
  Description of Artificial Sequence: Synthetic primer
ttatcggcccaagccttgtccca

SEQ ID NO: 451 - DNA, 23 bp, Artificial Sequence
  Description of Artificial Sequence: Synthetic primer
ttaactgtaggctgtgccgacat

SEQ ID NO: 452 - DNA, 26 bp, Artificial Sequence
  Description of Artificial Sequence: Synthetic primer
ctattgtggcaattctttcaacttat

SEQ ID NO: 453 - DNA, 28 bp, Artificial Sequence
  Description of Artificial Sequence: Synthetic primer
ttaattaatagtcttcttctttcttatc

SEQ ID NO: 454 - DNA, 27 bp, Artificial Sequence
  Description of Artificial Sequence: Synthetic primer
tcacatttttctaaattcacttagcac

SEQ ID NO: 455 - DNA, 22 bp, Artificial Sequence
  Description of Artificial Sequence: Synthetic primer
tcaggcactctcttcctccggt

SEQ ID NO: 456 - DNA, 25 bp, Artificial Sequence
  Description of Artificial Sequence: Synthetic primer
ctaattacttaacgtttgacactcc

SEQ ID NO: 457 - DNA, 26 bp, Artificial Sequence
  Description of Artificial Sequence: Synthetic primer
ttatggcttttctaattcttgcaaga

SEQ ID NO: 458 - DNA, 21 bp, Artificial Sequence
  Description of Artificial Sequence: Synthetic primer
tcaacagcagcccccaccggt

SEQ ID NO: 459 - DNA, 26 bp, Artificial Sequence
  Description of Artificial Sequence: Synthetic primer
ttatggaaaatattcaatcacaccga

SEQ ID NO: 460 - DNA, 25 bp, Artificial Sequence
  Description of Artificial Sequence: Synthetic primer
ttaacgaccaaatttacgtagctct

SEQ ID NO: 461 - DNA, 26 bp, Artificial Sequence
  Description of Artificial Sequence: Synthetic primer
ctaatttaatggagtagtttcgttcc

SEQ ID NO: 462 - DNA, 26 bp, Artificial Sequence
  Description of Artificial Sequence: Synthetic primer
ttaactacttgagttttctttccagc

SEQ ID NO: 463 - DNA, 23 bp, Artificial Sequence
  Description of Artificial Sequence: Synthetic primer
ttatgttagcagcattccggcct

SEQ ID NO: 464 - DNA, 28 bp, Artificial Sequence
  Description of Artificial Sequence: Synthetic primer
tcaaaaatttaacagttcgataatttca

SEQ ID NO: 465 - DNA, 27 bp, Artificial Sequence
  Description of Artificial Sequence: Synthetic primer
ttaaaaccaacagaatttggtattgtt

SEQ ID NO: 466 - DNA, 24 bp, Artificial Sequence
  Description of Artificial Sequence: Synthetic primer
tcaaaggcttacatctccagaatc

SEQ ID NO: 467 - DNA, 25 bp, Artificial Sequence
  Description of Artificial Sequence: Synthetic primer
ctaaaacttaccggctgcgttaaat

SEQ ID NO: 468 - DNA, 23 bp, Artificial Sequence
  Description of Artificial Sequence: Synthetic primer
tcaagagcgcaaacttttcccgt

SEQ ID NO: 469 - DNA, 25 bp, Artificial Sequence
  Description of Artificial Sequence: Synthetic primer
ttacaaaccttgttgagctcttctt

SEQ ID NO: 470 - DNA, 23 bp, Artificial Sequence
  Description of Artificial Sequence: Synthetic primer
ctacacacgtttccaacctctgc

SEQ ID NO: 471 - DNA, 26 bp, Artificial Sequence
  Description of Artificial Sequence: Synthetic primer
ctaatcattgagatcgaatttgtaca

SEQ ID NO: 472 - DNA, 24 bp, Artificial Sequence
  Description of Artificial Sequence: Synthetic primer
tcacatacatacctgcggtagcaa

SEQ ID NO: 473 - DNA, 25 bp, Artificial Sequence
  Description of Artificial Sequence: Synthetic primer
ttagtctgaatcagaatctgtgtct

SEQ ID NO: 474 - DNA, 24 bp, Artificial Sequence
  Description of Artificial Sequence: Synthetic primer
ttattcaccctcacccctaatacc

SEQ ID NO: 475 - DNA, 24 bp, Artificial Sequence
  Description of Artificial Sequence: Synthetic primer
ttactcgaacgggatttggcctaa

SEQ ID NO: 476 - DNA, 26 bp, Artificial Sequence
  Description of Artificial Sequence: Synthetic primer
ctagtgaataaacctataatcaagac

SEQ ID NO: 477 - DNA, 25 bp, Artificial Sequence
  Description of Artificial Sequence: Synthetic primer
tcattcagatatgtaaattctgccc

SEQ ID NO: 478 - DNA, 27 bp, Artificial Sequence
  Description of Artificial Sequence: Synthetic primer
ttatctatagtgcttttgctttttgaa

SEQ ID NO: 479 - DNA, 23 bp, Artificial Sequence
  Description of Artificial Sequence: Synthetic primer
ttaccaacctacgtatcctctcg

SEQ ID NO: 480 - DNA, 28 bp, Artificial Sequence
  Description of Artificial Sequence: Synthetic primer
ttattgaatagcattatatattagtgcc

SEQ ID NO: 481 - DNA, 22 bp, Artificial Sequence
  Description of Artificial Sequence: Synthetic primer
ctaagtacggccggaagagagc

SEQ ID NO: 482 - DNA, 23 bp, Artificial Sequence
  Description of Artificial Sequence: Synthetic primer
tcagtccttctgctggctgttca

SEQ ID NO: 483 - DNA, 28 bp, Artificial Sequence
  Description of Artificial Sequence: Synthetic primer
tcaatttttatcttcatttttaatgtcc

SEQ ID NO: 484 - DNA, 24 bp, Artificial Sequence
  Description of Artificial Sequence: Synthetic primer
ttaacagcttgcaccagatccaga

SEQ ID NO: 485 - DNA, 25 bp, Artificial Sequence
  Description of Artificial Sequence: Synthetic primer
ttaaatctgttcttctggtggttga

SEQ ID NO: 486 - DNA, 26 bp, Artificial Sequence
  Description of Artificial Sequence: Synthetic primer
ttaacagagatttcccaaacattctg

SEQ ID NO: 487 - DNA, 25 bp, Artificial Sequence
  Description of Artificial Sequence: Synthetic primer
ttatatccatttctgtcttgcagca

SEQ ID NO: 488 - DNA, 26 bp, Artificial Sequence
  Description of Artificial Sequence: Synthetic primer
ttatttcaaaaccttaccgtcaacaa

SEQ ID NO: 489 - DNA, 25 bp, Artificial Sequence
  Description of Artificial Sequence: Synthetic primer
ttataacaacatagcagcagcagct

SEQ ID NO: 490 - DNA, 26 bp, Artificial Sequence
  Description of Artificial Sequence: Synthetic primer
tcaatggtttttgtaagcatctgata

SEQ ID NO: 491 - DNA, 25 bp, Artificial Sequence
  Description of Artificial Sequence: Synthetic primer
ttattgctgatcctgtaagcactca

SEQ ID NO: 492 - DNA, 26 bp, Artificial Sequence
  Description of Artificial Sequence: Synthetic primer
ttaagcggtaactttcttttcaatca

SEQ ID NO: 493 - DNA, 25 bp, Artificial Sequence
  Description of Artificial Sequence: Synthetic primer
ttaagcatcttcttcaacgacaacg

SEQ ID NO: 494 - DNA, 26 bp, Artificial Sequence
  Description of Artificial Sequence: Synthetic primer
tcaaatcaatggtttttcctcaattg

SEQ ID NO: 495 - DNA, 27 bp, Artificial Sequence
  Description of Artificial Sequence: Synthetic primer
tcaattacaaatccatggattaagttg

SEQ ID NO: 496 - DNA, 24 bp, Artificial Sequence
  Description of Artificial Sequence: Synthetic primer
tcattcccattcaacagttgcagg

SEQ ID NO: 497 - DNA, 25 bp, Artificial Sequence
  Description of Artificial Sequence: Synthetic primer
ctaattttccatcaattcagcgact

SEQ ID NO: 498 - DNA, 26 bp, Artificial Sequence
  Description of Artificial Sequence: Synthetic primer
ttaattatgattatcgttctggtctc

SEQ ID NO: 499 - DNA, 24 bp, Artificial Sequence
  Description of Artificial Sequence: Synthetic primer
tcaatcgtattctactccggatcc

SEQ ID NO: 500 - DNA, 25 bp, Artificial Sequence
  Description of Artificial Sequence: Synthetic primer
ttacattgccatcacacgtaaactg

SEQ ID NO: 501 - DNA, 23 bp, Artificial Sequence
  Description of Artificial Sequence: Synthetic primer
tcagtcaaaggtggctttgcgaa

SEQ ID NO: 502 - DNA, 25 bp, Artificial Sequence
  Description of Artificial Sequence: Synthetic primer
ttatatatctgtgggaaggggtaca

SEQ ID NO: 503 - DNA, 22 bp, Artificial Sequence
  Description of Artificial Sequence: Synthetic primer
ctactcgtattctagcgcagcg

SEQ ID NO: 504 - DNA, 26 bp, Artificial Sequence
  Description of Artificial Sequence: Synthetic primer
tcatctcatagtaaccaattcttctg

SEQ ID NO: 505 - DNA, 25 bp, Artificial Sequence
  Description of Artificial Sequence: Synthetic primer
ctaaaatcttttggcgcttaagttg

SEQ ID NO: 506 - DNA, 26 bp, Artificial Sequence
  Description of Artificial Sequence: Synthetic primer
ctattgaagttgattgaaccatacgt

SEQ ID NO: 507 - DNA, 24 bp, Artificial Sequence
  Description of Artificial Sequence: Synthetic primer
ttacatcaacaaactcgacgtcca

SEQ ID NO: 508 - DNA, 25 bp, Artificial Sequence
  Description of Artificial Sequence: Synthetic primer
tcatttttcgtttgcagtatggaca

SEQ ID NO: 509 - protein, 197 aa, Brassica napus
MSASRFIKCVTVGDGAVGKTCLLISYTSNTFPTDYVPTVFDNFSANVVVNGATVNLGLWDTAGQEDYNRLRPLSYRGADVFILAFSLISKASYENVSKKWIPELTHYAPGVPIVLVGTKLDLRDDKQFFVDHPGAVPITTAQGEELMKLIGAPSYIECSSKSQKNVKGVFDAAIRVVLQPPKQKKKKGKVQKACSIL

SEQ ID NO: 510 - protein, 196 aa, Brassica napus
MSASRFIKCVTVGDGAVGKTCMLISYTSNTFPTDYVPTVFDNFSANVVVDGNTVNLGLWDTAGQEDYNRLRPLSYRGADVFILAFSLISKASYENIAKKWIPELRHYAPGVPIILVGTKLDLRDDKQFFIDHPGAVPITTNQGEELKKLIGSPVYIECSSKTQQNVKAVFDAAIKVVLQPPKSKKKKKNKNRCVFL

SEQ ID NO: 511 - protein, 197 aa, Brassica napus
MSASRFIKCVTVGDGAVGKTCLLISYTSNTFPTDYVPTVFDNFSANVVVNGATVNLGLWDTAGQEDYNRLRPLSYRGADVFILAFSLISKASYENVSKKWIPELTHYAPGVPIVLVGTKLDLRDDKQFFVDHPGAVPITTAQGEELMKLIGAPSYIECSSKSQENVKGVFDAAIRVVLQPPKQKKKKSKAQKACSIL

SEQ ID NO: 512 - protein, 201 aa, Brassica napus
MSTARFIKCVTVGDGAVGKTCMLISYTSNTFPTDYVPTVFDNFSANVVVDGSTVNLGLWDTAGQEDYNRLRPLSYRGADVFLLAFSLISKASYENIYKKWLPELKHYAPSIPIVLVGTKLDLRDDKQFLKDHPGAASITTAQGEELRKMIGAIKYIECSSKTQQNVKAVFDTAIRVALRPPKAKKKIKPLRTKRSRTCFFF

SEQ ID NO: 513 - protein, 211 aa, Brassica napus
MSASVAAASVSTTTTAATTFIKCVTVGDGAVGKTCLLISYTSNTFPTDYVPTVFDNFSANVLVDGKTVNLGLWDTAGQEDYNRLRPLSYRGADVFILAFSLISRPSFENIAKKWVPELRHYAPNVPIVLVGTKLDLREDKKFPMNYPGACTISTEQGQELRKEIGALAYIECSSKTQQNVKAVFDAAIKVVLQPPTKIKKQKRRFRFCHAL

SEQ ID NO: 514 - protein, 216 aa, Brassica napus
MASTASKFIKCVTVGDGAVGKTCMLICYTSNKFPTDYIPTVFDNFSANVVVEGTTVNLGLWDTAGQEDYNRLRPLSYRGADVFVLSFSLVSRASYENVYKKWIPELQHFAPGVPLVLVGTKLDLREDNKHYLADHPGLSPVTTAQGEELRKLIGATYYIECSSKTQQNVKAVFDSAIKEVIKPVVKQKEKTQKTKKQKSNHGCLSNVLCGRIVTRH

SEQ ID NO: 515 - protein, 216 aa, Brassica napus
MASSASKFIKCVTVGDGAVGKTCMLICYTSNKFPTDYVPTVFDNFSANVVVEGTTVNLGLWDTAGQEDYNRLRPLSYRGADVFVLSFSLVSRASYENVFKKWIPELQHFAPGVPLVLVGTKLDLREDKHYLADHPGLSPVTTAQGEELRKLIGATYYIECSSKTQQNVKAVFDSAIKEVIKPVLKQKGKTKKKKKQQSNHHGCLSNVLCGRIVTRH

SEQ ID NO: 516 - protein, 195 aa, Brassica napus
MSASRFIKCVTVGDGAVGKTCMLISYTSNTFPTDYVPTVFDNFSANVVVDGNTVNLGLWDTAGQEDYNRLRPLSYRGADVFILAFSLISKASYENIAKKWIPELRHYAPGVPIILVGTKLDLRDDKQFFIDHPGAVPISTNQGEELKKLIGSPAYIECSSKTQQNVKAVFDAAIKVVLQPPKQKKKKKKNGCVFL

SEQ ID NO: 517 - protein, 198 aa, Brassica napus
MSASRFIKCVTVGDGAVGKTCLLISYTSNTFPTDYVPTVFDNFSANVIVDGNTINLGLWDTAGQEDYNRLRPLSYRGADVFLLAFSLVSKASYENVSKKWVPELRHYAPGVPIILVGTKLDLRDDKQFFVEHPGAVPISTAQGEELKKVIGAPAYIECSAKTQQNVKAVFDAAIKVVLQPPKNKKRKKRKSQKACSIL

SEQ ID NO: 518 - protein, 196 aa, Glycine max
MSTARFIKCVTVGDGAVGKTCMLISYTSNTFPTDYVPTVFDNFSANVTVDGSTVNLGLWDTAGQEDYNRLRPLSYRGADVFLLCYSLISKASYENISKKWIPELRHYAPNVPIVLVGTKLDLRDDKQFLIDHPGSARITTAQGEELKKMIGAVTYIECSSKTQLNVKTVFDAAIKVALKPPKPKKKPRKKRTCTFL

SEQ ID NO: 519 - protein, 197 aa, Glycine max
MSTTRFIKCVTVGDGAVGKTCMLISYTSNTFPTDYVPTVFDNFSANVVVDGSTVNLGLWDTAGQEDYNRLRPLSYRGADVFLLAFSLISKASYENISKKWIPELRHYAPTVPIVLVGTKLDLREDRQYLIDHPGTTAIATAQGEELKKAIGAAVYIECSSKTQQNVKAVFDAAIKVVLQPPKSKKKGKKKNTPCVFL

SEQ ID NO: 520 - protein, 196 aa, Glycine max
MSASRFIKCVTVGDGAVGKTCLLISYTSNTFPTDYVPTVFDNFSANVVVDGSTVNLGLWDTAGQEDYNRLRPLSYRGADVFILAFSLISKASYENIAKKWIPELRHYAPGVPIILVGTKLDLRDDKQFFMDHPGAVPITTAQGEELRKLIGAPAYIECSSKTQQNVKAVFDAAIKVVIQPPKLKKKRKTQKACSIL

SEQ ID NO: 521 - protein, 212 aa, Glycine max
MASATAPRFIKCVTVGDGAVGKTCMLICYTSNKFPTDYIPTVFDNFSANVVVEGITVNLGLWDTAGQEDYNRLRPLSYRGADVFVLAFSLVSKASYENVLKKWIPELQHFAPGIPLVLVGTKLDLREDKHYMADHPSLVPVTTDQGEELRKHIGATYYIECSSKTQQNVKAVFDAAIRMVIKPPQKQNEKRKKKPRGCFLNVLCRRNIVRLK

SEQ ID NO: 522 - protein, 197 aa, Glycine max
MSASRFIKCVTVGDGAVGKTCMLISYTSNTFPTDYVPTVFDNFSANVVVDGSTVNLGLWDTAGQEDYNRLRPLSYRGADVFLLAFSLISRASYENVAKKWIPELRHYAPGVPIILVGTKLDLRDDKQFFQDHPGAVPITTAQGEELRKLIGAPIYIECSSKTQQNVKAVFDAAIKVVLQPPKQKKKKRKGQKACSIL

SEQ ID NO: 523 - protein, 197 aa, Glycine max
MSASRFIKCVTVGDGAVGKTCLLISYTSNTFPTDYVPTVFDNFSANVVVNGSIVNLGLWDTAGQEDYNRLRPLSYRGADVFILAFSLISKASYENVSKKWIPELKHYAPGVPIILVGTKLDLRDDKQFCIDHPGAVPITTAQGEELRKLINAPAYIECSSKTQENVKAVFDAAIRVVLQPPKQKKKKGKAQKACSIL

SEQ ID NO: 524 - protein, 197 aa, Glycine max; identical to SEQ ID NO: 522

SEQ ID NO: 525 - protein, 214 aa, Oryza sativa
MSGATKFIKCVTVGDGAVGKTCMLICYISNKFPTDYIPTVFDNFSANVSVDGNIVNLGLWDTAGQEDYSRLRPLSYRGADIFVLAFSLISRASYENVLKKWMPELRRFAPNVPIVLVGTKLDLRDHRSYLADHPAASAITTAQGEELRKQIGAAAYIECSSKTQQNIKAVFDTAIKVVLQPPRRRGETTMARKKTRRSTGCSLKNLMCGSACVV

SEQ ID NO: 526 - protein, 199 aa, Oryza sativa
MGCSSSVPARSTGGLNNISNDNSATDSKDLRAKLVLLGDSGVGKSCIVLRFVRGQFDPTSKVTVGASFLSQTLALEDSTIVKFEIWDTAGQERYAALAPLYYRGAAAAVVVYDITSPESFSKAQYWVKELQKHGSPDIIMVLVGNKADLHENRHVSSQEAQEYAEKNNMVFIETSAKTADNINQVFEEIAKRLPRPTAS

SEQ ID NO: 527 - protein, 215 aa, Oryza sativa
MASSASRFIKCVTVGDGAVGKTCMLICYTSNKFPTDYVPTVFDNFSANVVVDGTTVNLGLWDTAGQEDYNRLRPLSYRGADVFVLAFSLVSRASYENVMKKWLPELQHYAPGVPIVLVGTKLDLREDKHYLLDHPSLVPVTTAQGEELRKHIGATCYIECSSKTQQNVKAVFDAAIKVVIKPPTKQRDRKKKKTRRGCSFFCKGVMSRRRLVCFK

SEQ ID NO: 528 - protein, 212 aa, Oryza sativa
MGSKPPPPPQPSVSFKLVLLGDGRVGKTSLVLRYVNDVFSDKQEATVQASYLTKRLVVEGVPITLSIWDTAGQEKFHALGPIYYRDADAALLVYDITDNDTFLRVTKWVKELKQMANKDIVMAIAANKSDLVRSKHIDTNEAASYAESIGATLFVTSAKAGTGIDDIFSDIAKRLLERRKNSSDGLSLAHPKKGILIVDDEPEKEPPPKCCS

SEQ ID NO: 529 - protein, 214 aa, Oryza sativa
MSSAAAATRFIKCVTVGDGAVGKTCMLICYTCNKFPTDYIPTVFDNFSANVSVDGSVVNLGLWDTAGQEDYSRLRPLSYRGADVFILSFSLISRASYENVQKKWMPELRRFAPGVPVVLVGTKLDLREDRAYLADHPASSIITTEQGEELRKLIGAVAYIECSSKTQRNIKAVFDTAIKVVLQPPRHKDVTRKKLQSSSNRPVRRYFCGSACFA

SEQ ID NO: 530 - protein, 192 aa, Saccharomyces cerevisiae
MSEKAVRRKLVIIGDGACGKTSLLYVFTLGKFPEQYHPTVFENYVTDCRVDGIKVSLTLWDTAGQEEYERLRPFSYSKADIILIGFAVDNFESLINARTKWADEALRYCPDAPIVLVGLKKDLRQEAHFKENATDEMVPIEDAKQVARAIGAKKYMECSALTGEGVDDVFEVATRTSLLMKKEPGANCCIIL

SEQ ID NO: 531 - protein, 4 aa, Artificial Sequence
  Description of Artificial Sequence: Synthetic peptide
KDEL

SEQ ID NO: 532 - protein, 6 aa, Artificial Sequence
  Description of Artificial Sequence: Synthetic peptide
SEKDEL

SEQ ID NO: 533 - DNA, 38 bp, Saccharomyces cerevisiae
ggaattccagctgaccaccatggcaattcccggggatc

SEQ ID NO: 534 - DNA, 38 bp, Escherichia coli
ttgctcttccatggcaatgattaattaacgaagagcaa

1) A transformed plant cell with altered metabolic activity compared to a corresponding non-transformed, wild-type plant cell, wherein the metabolic activity is altered by transformation with a Stress-Related Protein (SRP) coding nucleic acid and results in increased tolerance and/or resistance to an environmental stress as compared to a corresponding non-transformed, wild-type plant cell.

2) The transformed plant cell of claim 1, wherein metabolic activity is altered concerning one or more metabolites selected from the group consisting of 2,3-dimethyl-5-phytylquinol, 2-hydroxy-palmitic acid, 3,4-dihydroxyphenyl-alanine (=dopa), 3-hydroxy-palmitic acid, 5-oxoproline, alanine, alpha linolenic acid (c18:3 (c9, c12, c15)), alpha-tocopherol, aminoadipic acid, anhydroglucose, arginine, aspartic acid, beta-apo-8′ carotenal, beta-carotene, beta-sitosterol, beta-tocopherol, (delta-7-cis,10-cis)hexadecadienic acid, hexadecatrienic acid, margaric acid, delta-15-cis-tetracosenic acid, ferulic acid, campesterol, cerotic acid (c26:0), citrulline, cryptoxanthine, eicosenoic acid (20:1), fructose, fumarate, galactose, gamma-aminobutyric acid, gamma-tocopherol, gluconic acid, glucose, glutamic acid, glutamine, glycerate, glycerinaldehyde, glycerol, glycerol-3-phosphate, glycine, homoserine, inositol, isoleucine, iso-maltose, isopentenyl pyrophosphate, leucine, lignoceric acid (c24:0), linoleic acid (c18:2 (c9, c12)), luteine, lycopene, malate, mannose, methionine, methylgalactofuranoside, methylgalactopyranoside, methylgalactopyranoside, palmitic acid (c16:0), phenylalanine, phosphate, proline, putrescine, pyruvat, raffinose, ribonic acid, serine, shikimate, sinapine acid, stearic acid (c18:0), succinate, sucrose, threonine, triacontanoic acid, tryptophane, tyrosine, ubichinone, udp-glucose, valine, zeaxanthine.

3) The transgenic plant cell of claim 1 or 2, wherein the metabolic activity is altered by transformation of a plant with nucleic acid encoding a Stress-Related Protein (SRP), wherein the nucleic acid is selected from the group consisting of: a) a nucle is acid molecule encoding one of the polypeptides disclosed in the Sequence Listing or a fragment thereof, which confers an altered metabolic activity in an organism or a part thereof; b) a nucleic acid molecule comprising one of the nucleic acid molecules disclosed in the Sequence Listing; c) a nucleic acid molecule whose sequence can be deduced from a polypeptide sequence encoded by a nucleic acid molecule of (a) or (b) as a result of the degeneracy of the genetic code and conferring an altered metabolic activity in an organism or a part thereof; d) a nucleic acid molecule which encodes a polypeptide which has at least 50% identity with the amino acid sequence of the polypeptide encoded by the nucleic acid molecule of (a) to (c) and conferring an altered metabolic activity in an organism or a part thereof; e) a nucleic acid molecule which hybridizes with a nucleic acid molecule of (a) to (c) under under stringent hybridisation conditions and conferring an altered metabolic activity in an organism or a part thereof; f) a nucleic acid molecule which encompasses a nucleic acid molecule which is obtained by amplifying nucleic acid molecules from a cDNA library or a genomic library using the primers in table 2 and conferring an altered metabolic activity in an organism or a part thereof; g) a nucleic acid molecule encoding a polypeptide which is isolated with the aid of monoclonal antibodies against a polypeptide encoded by one of the nucleic acid molecules of (a) to (f) and conferring an altered metabolic activity in an organism or a part thereof; and h) a nucleic acid molecule which is obtainable by screening a suitable nucleic acid library under stringent hybridization conditions with a probe comprising one of the sequences of the nucleic acid molecule of (a) to (g) or with a fragment thereof having at least 15 nt, preferably 20 nt, 30 nt, 50 nt, 100 nt, 200 nt or 500 nt of the nucleic acid molecule characterized in (a) to (g) and conferring an altered metabolic activity in an organism or a part thereof; or comprising a sequence which is complementary thereto.

4) The transgenic plant cell of claim 3, wherein the environmental stress is selected from the group consisting of salinity, drought, temperature, metal, chemical, pathogenic and oxidative stresses, or combinations thereof.

5) The transgenic plant cell of any of claims 1-4 derived from a monocotyledonous plant.

6) The transgenic plant cell of any of claims 1-5 derived from a dicotyledonous plant.

7) The transgenic plant cell of any of claims 1-6, wherein the plant is selected from the group consisting of maize, wheat, rye, oat, triticale, rice, barley, soybean, peanut, cotton, rapeseed, canola, manihot, pepper, sunflower, flax, borage, safflower, linseed, primrose, rapeseed, turnip rape, tagetes, solanaceous plants, potato, tobacco, eggplant, tomato, Vicia species, pea, alfalfa, coffee, cacao, tea, Salix species, oil palm, coconut, perennial grass, forage crops and Arabidopsis thaliana.

8) The transgenic plant cell of any of claims 1-4, derived from a gymnosperm plant.

9) The transgenic plant cell of any of claim 1-4 or 6, wherein the plant is selected from the group of spruce, pine and fir.

10) A transgenic plant generated from a plant cell according to any of claims 1-7 and which is a monocot or dicot plant.

11) A transgenic plant of claim 10, which is selected from the group consisting of maize, wheat, rye, oat, triticale, rice, barley, soybean, peanut, cotton, rapeseed, canola, manihot, pepper, sunflower, flax, borage, safflower, linseed, primrose, rapeseed, turnip rape, tagetes, solanaceous plants, potato, tobacco, eggplant, tomato, Vicia species, pea, alfalfa, coffee, cacao, tea, Salix species, oil palm, coconut, perennial grass, forage crops and Arabidopsis thaliana.

12) A transgenic plant generated from a plant cell according to any of claim 1-4, 8 or 9 and which is a gymnosperm plant.

13) A transgenic plant of claim 12, which is selected from the group consisting of spruce, pine and fir.

14) A seed produced by a transgenic plant of any of claims 10-13, wherein the seed is genetically homozygous for a transgene conferring altered metabolic activity resulting in an increased tolerance to environmental stress as compared to a corresponding non-transformed, wild-type plant.

15) An isolated nucleic acid molecule comprising a nucleic acid molecule selected from the group consisting of: a) a nucleic acid molecule encoding of the polypeptide disclosed in the Sequence Listing or a fragment thereof, which confers an altered metabolic activity in an organism or a part thereof; b) a nucleic acid molecule comprising of the nucleic acid molecule disclosed in the Sequence Listing; c) a nucleic acid molecule whose sequence can be deduced from a polypeptide sequence encoded by a nucleic acid molecule of (a) or (b) as a result of the degeneracy of the genetic code and conferring an altered metabolic activity in an organism or a part thereof; d) a nucleic acid molecule which encodes a polypeptide which has at least 50% identity with the amino acid sequence of the polypeptide encoded by the nucleic acid molecule of (a) to (c) and conferring an altered metabolic activity in an organism or a part thereof; e) a nucleic acid molecule which hybridizes with a nucleic acid molecule of (a) to (c) under under stringent hybridisation conditions and conferring an altered metabolic activity in an organism or a part thereof; f) a nucleic acid molecule which encompasses a nucleic acid molecule which is obtained by amplifying nucleic acid molecules from a cDNA library or a genomic library using the primers in table 2 and conferring an altered metabolic activity in an organism or a part thereof; g) a nucleic acid molecule encoding a polypeptide which is isolated with the aid of monoclonal antibodies against a polypeptide encoded by one of the nucleic acid molecules of (a) to (f) and conferring an altered metabolic activity in an organism or a part thereof; and h) a nucleic acid molecule which is obtainable by screening a suitable nucleic acid library under stringent hybridization conditions with a probe comprising one of the sequences of the nucleic acid molecule of (a) to (g) or with a fragment thereof having at least 15 nt, preferably 20 nt, 30 nt, 50 nt, 100 nt, 200 nt or 500 nt of the nucleic acid molecule characterized in (a) to (g) and conferring altered metabolic activity in an organism or a part thereof.

16) An isolated nucleic acid molecule comprising a nucleic acid molecule selected from the group consisting of: a) a nucleic acid molecule encoding of a polypeptide disclosed in the Sequence Listing or a fragment thereof, which confers an altered metabolic activity in an organism or a part thereof; b) a nucleic acid molecule comprising of a nucleic acid molecule disclosed in the Sequence Listing; c) a nucleic acid molecule whose sequence can be deduced from a polypeptide sequence encoded by a nucleic acid molecule of (a) or (b) as a result of the degeneracy of the genetic code and conferring an altered metabolic activity in an organism or a part thereof; d) a nucleic acid molecule which encodes a polypeptide which has at least 50% identity with the amino acid sequence of the polypeptide encoded by the nucleic acid molecule of (a) to (c) and conferring an altered metabolic activity in an organism or a part thereof; e) a nucleic acid molecule which hybridizes with a nucleic acid molecule of (a) to (c) under under stringent hybridisation conditions and conferring an altered metabolic activity in an organism or a part thereof; f) a nucleic acid molecule which encompasses a nucleic acid molecule which is obtained by amplifying nucleic acid molecules from a cDNA library or a genomic library using the primers in table 2 and conferring an altered metabolic activity in an organism or a part thereof; g) a nucleic acid molecule encoding a polypeptide which is isolated with the aid of monoclonal antibodies against a polypeptide encoded by one of the nucleic acid molecules of (a) to (f) and conferring an altered metabolic activity in an Organism or a part thereof; and h) a nucleic acid molecule which is obtainable by screening a suitable nucleic acid library under stringent hybridization conditions with a probe comprising one of the sequences of the nucleic acid molecule of (a) to (g) or with a fragment thereof having at least 15 nt, preferably 20 nt, 30 nt, 50 nt, 100 nt, 200 nt or 500 nt of the nucleic acid molecule characterized in (a) to (a) and conferring altered metabolic activity in an organism or a part thereof.

17) A nucleic acid construct which confers the expression of the nucleic acid molecule of claim 15 or 16, comprising one or more regulatory elements, whereby expression of the SRP coding nucleic acid in a host cell results altered metabolic activity resulting in increased tolerance to environmental stress as compared to a corresponding non-transformed wild type host cell.

18) A vector comprising the nucleic acid molecule as claimed in claim 15 or 16 or the nucleic acid construct of claim 17, whereby expression of the SRP coding nucleic acid in a host cell results altered metabolic activity resulting in increased tolerance to environmental stress as compared to a corresponding non-transformed wild type host cell.

19) A host cell, which has been transformed stably or transiently with the vector as claimed in claim 18 or the nucleic acid molecule as claimed in claim 15 or 16 or the nucleic acid construct of claim 17.

20) An isolated Stress Related Protein (SRP), which is selected from the group comprising a sequence disclosed in the Sequence Listing and/or homologs thereof.

21) An isolated Stress Related Protein (SRP) of claim 20 which is selected from yeast, preferably Saccharomyces cerevisiae, or E. coli, Brassica napus, Glycine max, or Oryza sativa.

22) A method of producing a transgenic plant with altered metabolic activity compared to a corresponding non-transformed, wild-type plant cell, wherein the metabolic activity is altered by expression of a Stress-Related Protein (SRP) coding nucleic acid and results in increased tolerance and/or resistance to an environmental stress as compared to a corresponding non-transformed, wild-type plant cell, comprising transforming a plant cell with an expression vector according to claim 18 and generating from the plant cell a transgenic plant with an increased tolerance to environmental stress as compared to a corresponding non-transformed, wild-type plant.

23) The method of claim 22, wherein the SRP coding nucleic acid is selected from the group comprising the nucleic acids disclosed in the Sequence Listing and/or homologs of the afore mentioned sequences.

24) The method of any of claim 22 or 23, wherein the SRP coding nucleic acid is at least about 50% homologous to one of the nucleic acids disclosed in the Sequence Listing.

25) A method of modifying stress tolerance of a plant comprising, modifying the level of expression of an SRP in the plant.

26) The method of claim 25, wherein the SRP encoding nucleic acid is selected from the group comprising the nucleic acids disclosed in the Sequence Listing and/or homologs of the afore mentioned sequences.

27) The method of any of claim 25 or 26, wherein the SRP coding nucleic acid is at least about 50% homologous to one of the nucleic acids disclosed in the Sequence Listing.

28) The method of any of claims 25-27, wherein an expression vector is used according to any of claim 17 or 18.

29) The method of any of claims 25-28, wherein the stress tolerance is decreased.

30) The method of any of claims 25-29, wherein the plant is transgenic.

31) The method of any of claims 25-30, wherein the plant is transformed with an inducible promoter that directs expression of the SRP.

32) The method of any of claims 25-31, wherein the promoter is tissue specific.

33) The method of any of claims 25-32, wherein the promoter is developmentally regulated.

34) The method of any of claims 25-33, wherein SRP expression is modified by administration of a targeting nucleic sequence complementary to the regulatory region of the SRP encoding nucleic acid and/or by a transcription factor and/or by a zinc finger protein.

35) A method of detecting environmental stress in plant cells or plants comprising screening the plant cells for altered metabolic activity as compared to non-stress conditions.

36) A method of screening plant cells or plants for increased tolerance and/or resistance to environmental stress comprising screening the plant cells under stress conditions for altered metabolic activity as compared to non-stress conditions.

37) A method of breeding plant cells or plants towards increased tolerance and/or resistance to environmental stress comprising screening the plant cells under stress conditions for altered metabolic activity as compared to non-stress conditions and selecting those with increased tolerance and/or resistance to environmental stress.

38) The method of one of claims 35-37, wherein metabolite activity is altered concerning one or more metabolites selected from the group consisting of 2,3-dimethyl-5-phytylquinol, 2-hydroxy-palmitic acid, 3,4-dihydroxyphenylalanine (=dopa), 3-hydroxy-palmitic acid, 5-oxoproline, alanine, alpha linolenic acid (c18:3 (c9, c12, c15)), alpha-tocopherol, aminoadipic acid, anhydroglucose, arginine, aspartic acid, beta-apo-8′ carotenal, beta-carotene, beta-sitosterol, beta-tocopherol, (delta-7-cis,10-cis)-hexadecadienic acid, hexadecatrienic acid, margaric acid, delta-15-cis-tetracosenic acid, ferulic acid, campesterol, cerotic acid (c26:0), citrulline, cryptoxanthine, eicosenoic acid (20:1), fructose, fumarates, galactose, gamma-aminobutyric acid, gamma-tocopherol, gluconic acid, glucose, glutamic acid, glutamine, glycerate, glycerinaldehyde, glycerol, glycerol-3-phosphate, glycine, homoserine, inositol, isoleucine, iso-maltose, isopentenyl pyrophosphate, leucine, lignoceric acid (c24:0), linoleic acid (c18:2 (c9, c12)), luteine, lycopene, malates, mannose, methionine, methylgalactofuranoside, methylgalactopyranoside, methylgalactopyranoside, palmitic acid (c16:0), phenylalanine, phosphate, proline, putrescine, pyruvat, raffinose, ribonic acid, serine, shikimate, sinapine acid, stearic acid (c18:0), succinates, sucrose, threonine, triacontanoic acid, tryptophane, tyrosine, ubichinone, udp-glucose, valine, zeaxanthine.

39) The method of one of the claims 35-38, wherein the altered metabolic activity is by transformation with a Stress-Related Protein (SRP) coding nucleic acid.

40) The method of one of the claims 35-39, wherein metabolic activity is altered by transformation with one or more Stress-Related Protein (SRP) coding nucleic acids selected from the group comprising at least one of the nucleic acids disclosed in the Sequence Listing and/or homologs of the afore mentioned sequences.

41) Use of a SRP encoding nucleic acid selected from the group comprising the nucleic acids disclosed in the Sequence Listing and/or homologs of the afore mentioned sequences for preparing a plant cell with increased environmental stress tolerance.

42) Use of altered metabolic activity and/or a SRP encoding nucleic acid selected from the group comprising the nucleic acids disclosed in the Sequence Listing and/or homologs of the afore mentioned sequences or parts thereof as markers for selection of plants or plant cells with increased tolerance to environmental stress.

43) Use of altered metabolic activity and/or a SRP encoding nucleic acid selected from the group comprising the nucleic acids disclosed in the Sequence Listing and/or homologs of the afore mentioned sequences or parts thereof as markers for detection of stress in plants or plant cells.

44) A nucleic acid construct which confers the expression of the nucleic acid molecule of claim 15 or 16, comprising one or more regulatory elements, whereby expression of the SRP coding nucleic acid in a host cell results in increased tolerance to environmental stress as compared to a corresponding non-transformed wild type host cell.

45) A vector comprising the nucleic acid molecule as claimed in claim 15 or 16 or the nucleic acid construct of claim 44, whereby expression of the SRP coding nucleic acid in a host cell results in increased tolerance to environmental stress as compared to a corresponding non-transformed wild type host cell.

46) A plant cell comprising a nucleic acid construct of claim 44 or a vector of claim 45.

47) A plant comprising a cell of claim 46.
